United States Patent Application Publication US 2024/0344070 A1 - sequence listing, part 2

SEQ ID NO: 2916 - RNA, 21 nt, synthetic construct
  source 1..21: mol_type = other RNA
  modified_base 1: mod_base = OTHER; note = 2'-O-methyladenosine-3'- phosphorothioate
  modified_base 2: mod_base = OTHER; note = 2'-O-methyladenosine-3'- phosphorothioate
  modified_base 3: mod_base = OTHER; note = 2'-O-methyladenosine-3'-phosphate
  modified_base 4: mod_base = OTHER; note = 2'-O-methyluridine-3'-phosphate
  modified_base 5: mod_base = OTHER; note = 2'-O-methylcytidine-3'-phosphate
  modified_base 6: mod_base = OTHER; note = 2'-O-methyladenosine-3'-phosphate
  modified_base 7: mod_base = OTHER; note = 2'-fluoroguanosine-3'-phosphate
  modified_base 8: mod_base = OTHER; note = 2'-O-methyluridine-3'-phosphate
  modified_base 9: mod_base = OTHER; note = 2'-fluoroadenosine-3'-phosphate
  modified_base 10: mod_base = OTHER; note = 2'-fluorocytidine-3'-phosphate
  modified_base 11: mod_base = OTHER; note = 2'-fluorouridine-3'-phosphate
  modified_base 12: mod_base = OTHER; note = 2'-O-methyluridine-3'-phosphate
  modified_base 13: mod_base = OTHER; note = 2'-O-methylcytidine-3'-phosphate
  modified_base 14: mod_base = OTHER; note = 2'-O-methylcytidine-3'-phosphate
  modified_base 15: mod_base = OTHER; note = 2'-O-methyladenosine-3'-phosphate
  modified_base 16: mod_base = OTHER; note = 2'-O-methyladenosine-3'-phosphate
  modified_base 17: mod_base = OTHER; note = 2'-O-methyladenosine-3'-phosphate
  modified_base 18: mod_base = OTHER; note = 2'-O-methylguanosine-3'-phosphate
  modified_base 19: mod_base = OTHER; note = 2'-O-methyluridine-3'-phosphate
  modified_base 20: mod_base = OTHER; note = 2'-O-methylcytidine-3'-phosphate
  modified_base 21: mod_base = OTHER; note 2'-O-methyluridine-3'-phosphate-N-[tris(GalNAc-alkyl)-amido decanoyl)]-4-hydroxyprolinol (Hyp-(GalNAc-alkyl)3)
aaatcagtacttccaaagtct

SEQ ID NO: 2917 - RNA, 23 nt, synthetic construct
  source 1..23: mol_type = other RNA
  modified_base 1: mod_base = OTHER; note = 2'-O-methyladenosine-3'- phosphorothioate
  modified_base 2: mod_base = OTHER; note = 2'-fluoroguanosine-3'-phosphorothioate
  modified_base 3: mod_base = OTHER; note = 2'-O-methyladenosine-3'-phosphate
  modified_base 4: mod_base = OTHER; note = 2'-O-methylcytidine-3'-phosphate
  modified_base 5: mod_base = OTHER; note = 2'-O-methyluridine-3'-phosphate
  modified_base 6: mod_base = OTHER; note = 2'-fluorouridine-3'-phosphate
  modified_base 7: mod_base = OTHER; note = 2'-O-methyluridine-3'-phosphate
  modified_base 8: mod_base = OTHER; note = 2'-fluoroguanosine-3'-phosphate
  modified_base 9: mod_base = OTHER; note = 2'-fluoroguanosine-3'-phosphate
  modified_base 10: mod_base = OTHER; note = 2'-O-methyladenosine-3'-phosphate
  modified_base 11: mod_base = OTHER; note = 2'-O-methyladenosine-3'-phosphate
  modified_base 12: mod_base = OTHER; note = 2'-O-methylguanosine-3'-phosphate
  modified_base 13: mod_base = OTHER; note = 2'-O-methyluridine-3'-phosphate
  modified_base 14: mod_base = OTHER; note = 2'-fluoroadenosine-3'-phosphate
  modified_base 15: mod_base = OTHER; note = 2'-O-methylcytidine-3'-phosphate
  modified_base 16: mod_base = OTHER; note = 2'-fluorouridine-3'-phosphate
  modified_base 17: mod_base = OTHER; note = 2'-O-methylguanosine-3'-phosphate
  modified_base 18: mod_base = OTHER; note = 2'-O-methyladenosine-3'-phosphate
  modified_base 19: mod_base = OTHER; note = 2'-O-methyluridine-3'-phosphate
  modified_base 20: mod_base = OTHER; note = 2'-O-methyluridine-3'-phosphate
  modified_base 21: mod_base = OTHER; note = 2'-O-methyluridine-3'-phosphorothioate
  modified_base 22: mod_base = OTHER; note = 2'-O-methyladenosine-3'- phosphorothioate
  modified_base 23: mod_base = OTHER; note = 2'-O-methylguanosine-3'-phosphate
agactttggaagtactgatttag

SEQ ID NO: 2918 - RNA, 21 nt, synthetic construct
  source 1..21: mol_type = other RNA
  modified_base 1: mod_base = OTHER; note = 2'-O-methyladenosine-3'- phosphorothioate
  modified_base 2: mod_base = OTHER; note = 2'-O-methyluridine-3'-phosphorothioate
  modified_base 3: mod_base = OTHER; note = 2'-O-methylguanosine-3'-phosphate
  modified_base 4: mod_base = OTHER; note = 2'-O-methylcytidine-3'-phosphate
  modified_base 5: mod_base = OTHER; note = 2'-O-methyluridine-3'-phosphate
  modified_base 6: mod_base = OTHER; note = 2'-O-methyladenosine-3'-phosphate
  modified_base 7: mod_base = OTHER; note = 2'-fluoroadenosine-3'-phosphate
  modified_base 8: mod_base = OTHER; note = 2'-O-methyladenosine-3'-phosphate
  modified_base 9: mod_base = OTHER; note = 2'-fluorouridine-3'-phosphate
  modified_base 10: mod_base = OTHER; note = 2'-fluorocytidine-3'-phosphate
  modified_base 11: mod_base = OTHER; note = 2'-fluoroadenosine-3'-phosphate
  modified_base 12: mod_base = OTHER; note = 2'-O-methylguanosine-3'-phosphate
  modified_base 13: mod_base = OTHER; note = 2'-O-methyluridine-3'-phosphate
  modified_base 14: mod_base = OTHER; note = 2'-O-methyladenosine-3'-phosphate
  modified_base 15: mod_base = OTHER; note = 2'-O-methylcytidine-3'-phosphate
  modified_base 16: mod_base = OTHER; note = 2'-O-methyluridine-3'-phosphate
  modified_base 17: mod_base = OTHER; note = 2'-O-methyluridine-3'-phosphate
  modified_base 18: mod_base = OTHER; note = 2'-O-methylcytidine-3'-phosphate
  modified_base 19: mod_base = OTHER; note = 2'-O-methylcytidine-3'-phosphate
  modified_base 20: mod_base = OTHER; note = 2'-O-methyladenosine-3'-phosphate
  modified_base 21: mod_base = OTHER; note 2'-O-methyladenosine-3'-phosphate-N-[tris(GalNAc-alkyl)-ami dodecanoyl)]-4-hydroxyprolinol (Hyp-(GalNAc-alkyl)3)
atgctaaatcagtacttccaa

SEQ ID NO: 2919 - RNA, 23 nt, synthetic construct
  source 1..23: mol_type = other RNA
  modified_base 1: mod_base = OTHER; note = 2'-O-methyluridine-3'-phosphorothioate
  modified_base 2: mod_base = OTHER; note = 2'-fluorouridine -3'-phosphorothioate
  modified_base 3: mod_base = OTHER; note = 2'-O-methylguanosine-3'-phosphate
  modified_base 4: mod_base = OTHER; note = 2'-O-methylguanosine-3'-phosphate
  modified_base 5: mod_base = OTHER; note = 2'-O-methyladenosine-3'-phosphate
  modified_base 6: mod_base = OTHER; note = 2'-fluoroadenosine-3'-phosphate
  modified_base 7: mod_base = OTHER; note = 2'-O-methylguanosine-3'-phosphate
  modified_base 8: mod_base = OTHER; note = 2'-fluorouridine-3'-phosphate
  modified_base 9: mod_base = OTHER; note = 2'-fluoroadenosine-3'-phosphate
  modified_base 10: mod_base = OTHER; note = 2'-O-methylcytidine-3'-phosphate
  modified_base 11: mod_base = OTHER; note = 2'-O-methyluridine-3'-phosphate
  modified_base 12: mod_base = OTHER; note = 2'-O-methylguanosine-3'-phosphate
  modified_base 13: mod_base = OTHER; note = 2'-O-methyladenosine-3'-phosphate
  modified_base 14: mod_base = OTHER; note = 2'-fluorouridine-3'-phosphate
  modified_base 15: mod_base = OTHER; note = 2'-O-methyluridine-3'-phosphate
  modified_base 16: mod_base = OTHER; note = 2'-fluorouridine-3'-phosphate
  modified_base 17: mod_base = OTHER; note = 2'-O-methyladenosine-3'-phosphate
  modified_base 18: mod_base = OTHER; note = 2'-O-methylguanosine-3'-phosphate
  modified_base 19: mod_base = OTHER; note = 2'-O-methylcytidine-3'-phosphate
  modified_base 20: mod_base = OTHER; note = 2'-O-methyladenosine-3'-phosphate
  modified_base 21: mod_base = OTHER; note = 2'-O-methyluridine-3'-phosphorothioate
  modified_base 22: mod_base = OTHER; note = 2'-O-methylguanosine-3'- phosphorothioate
  modified_base 23: mod_base = OTHER; note = 2'-O-methyluridine-3'-phosphate
ttggaagtactgatttagcatgt

SEQ ID NO: 2920 - RNA, 21 nt, synthetic construct
  source 1..21: mol_type = other RNA
  modified_base 1: mod_base = OTHER; note = 2'-O-methylcytidine-3'- phosphorothioate
  modified_base 2: mod_base = OTHER; note = 2'-O-methyladenosine-3'- phosphorothioate
  modified_base 3: mod_base = OTHER; note = 2'-O-methyluridine-3'-phosphate
  modified_base 4: mod_base = OTHER; note = 2'-O-methylguanosine-3'-phosphate
  modified_base 5: mod_base = OTHER; note = 2'-O-methylcytidine-3'-phosphate
  modified_base 6: mod_base = OTHER; note = 2'-O-methyluridine-3'-phosphate
  modified_base 7: mod_base = OTHER; note = 2'-fluoroadenosine-3'-phosphate
  modified_base 8: mod_base = OTHER; note = 2'-O-methyladenosine-3'-phosphate
  modified_base 9: mod_base = OTHER; note = 2'-fluoroadenosine-3'-phosphate
  modified_base 10: mod_base = OTHER; note = 2'-fluorouridine-3'-phosphate
  modified_base 11: mod_base = OTHER; note = 2'-fluorocytidine-3'-phosphate
  modified_base 12: mod_base = OTHER; note = 2'-O-methyladenosine-3'-phosphate
  modified_base 13: mod_base = OTHER; note = 2'-O-methylguanosine-3'-phosphate
  modified_base 14: mod_base = OTHER; note = 2'-O-methyluridine-3'-phosphate
  modified_base 15: mod_base = OTHER; note = 2'-O-methyladenosine-3'-phosphate
  modified_base 16: mod_base = OTHER; note = 2'-O-methylcytidine-3'-phosphate
  modified_base 17: mod_base = OTHER; note = 2'-O-methyluridine-3'-phosphate
  modified_base 18: mod_base = OTHER; note = 2'-O-methyluridine-3'-phosphate
  modified_base 19: mod_base = OTHER; note = 2'-O-methylcytidine-3'-phosphate
  modified_base 20: mod_base = OTHER; note = 2'-O-methylcytidine-3'-phosphate
  modified_base 21: mod_base = OTHER; note 2'-O-methyladenosine-3'-phosphate-N-[tris(GalNAc-alkyl)-ami dodecanoyl)]-4-hydroxyprolinol (Hyp-(GalNAc-alkyl)3)
catgctaaatcagtacttcca

SEQ ID NO: 2921 - RNA, 23 nt, synthetic construct
  source 1..23: mol_type = other RNA
  modified_base 1: mod_base = OTHER; note = 2'-O-methyluridine-3'-phosphorothioate
  modified_base 2: mod_base = OTHER; note = 2'-fluoroguanosine-3'-phosphorothioate
  modified_base 3: mod_base = OTHER; note = 2'-O-methylguanosine-3'-phosphate
  modified_base 4: mod_base = OTHER; note = 2'-O-methyladenosine-3'-phosphate
  modified_base 5: mod_base = OTHER; note = 2'-O-methyladenosine-3'-phosphate
  modified_base 6: mod_base = OTHER; note = 2'-fluoroguanosine-3'-phosphate
  modified_base 7: mod_base = OTHER; note = 2'-O-methyluridine-3'-phosphate
  modified_base 8: mod_base = OTHER; note = 2'-fluoroadenosine-3'-phosphate
  modified_base 9: mod_base = OTHER; note = 2'-fluorocytidine-3'-phosphate
  modified_base 10: mod_base = OTHER; note = 2'-O-methyluridine-3'-phosphate
  modified_base 11: mod_base = OTHER; note = 2'-O-methylguanosine-3'-phosphate
  modified_base 12: mod_base = OTHER; note = 2'-O-methyladenosine-3'-phosphate
  modified_base 13: mod_base = OTHER; note = 2'-O-methyluridine-3'-phosphate
  modified_base 14: mod_base = OTHER; note = 2'-fluorouridine-3'-phosphate
  modified_base 15: mod_base = OTHER; note = 2'-O-methyluridine-3'-phosphate
  modified_base 16: mod_base = OTHER; note = 2'-fluoroadenosine-3'-phosphate
  modified_base 17: mod_base = OTHER; note = 2'-O-methylguanosine-3'-phosphate
  modified_base 18: mod_base = OTHER; note = 2'-O-methylcytidine-3'-phosphate
  modified_base 19: mod_base = OTHER; note = 2'-O-methyladenosine-3'-phosphate
  modified_base 20: mod_base = OTHER; note = 2'-O-methyluridine-3'-phosphate
  modified_base 21: mod_base = OTHER; note = 2'-O-methylguanosine-3'- phosphorothioate
  modified_base 22: mod_base = OTHER; note = 2'-O-methyluridine-3'-phosphorothioate
  modified_base 23: mod_base = OTHER; note = 2'-O-methyluridine-3'-phosphate
tggaagtactgatttagcatgtt

SEQ ID NO: 2922 - RNA, 21 nt, synthetic construct
  source 1..21: mol_type = other RNA
  modified_base 1: mod_base = OTHER; note = 2'-O-methyluridine-3'-phosphorothioate
  modified_base 2: mod_base = OTHER; note = 2'-O-methylcytidine-3'- phosphorothioate
  modified_base 3: mod_base = OTHER; note = 2'-O-methylcytidine-3'-phosphate
  modified_base 4: mod_base = OTHER; note = 2'-O-methyluridine-3'-phosphate
  modified_base 5: mod_base = OTHER; note = 2'-O-methylcytidine-3'-phosphate
  modified_base 6: mod_base = OTHER; note = 2'-O-methyladenosine-3'-phosphate
  modified_base 7: mod_base = OTHER; note = 2'-fluoroadenosine-3'-phosphate
  modified_base 8: mod_base = OTHER; note = 2'-O-methyluridine-3'-phosphate
  modified_base 9: mod_base = OTHER; note = 2'-fluorouridine-3'-phosphate
  modified_base 10: mod_base = OTHER; note = 2'-fluoroguanosine-3'-phosphate
  modified_base 11: mod_base = OTHER; note = 2'-fluoroadenosine-3'-phosphate
  modified_base 12: mod_base = OTHER; note = 2'-O-methyladenosine-3'-phosphate
  modified_base 13: mod_base = OTHER; note = 2'-O-methylguanosine-3'-phosphate
  modified_base 14: mod_base = OTHER; note = 2'-O-methyladenosine-3'-phosphate
  modified_base 15: mod_base = OTHER; note = 2'-O-methyladenosine-3'-phosphate
  modified_base 16: mod_base = OTHER; note = 2'-O-methylguanosine-3'-phosphate
  modified_base 17: mod_base = OTHER; note = 2'-O-methyluridine-3'-phosphate
  modified_base 18: mod_base = OTHER; note = 2'-O-methylguanosine-3'-phosphate
  modified_base 19: mod_base = OTHER; note = 2'-O-methylguanosine-3'-phosphate
  modified_base 20: mod_base = OTHER; note = 2'-O-methylcytidine-3'-phosphate
  modified_base 21: mod_base = OTHER; note 2'-O-methylguanosine-3'-phosphate-N-[tris(GalNAc-alkyl)-ami dodecanoyl)]-4-hydroxyprolinol (Hyp-(GalNAc-alkyl)3)
tcctcaattgaagaagtggcg

SEQ ID NO: 2923 - RNA, 23 nt, synthetic construct
  source 1..23: mol_type = other RNA
  modified_base 1: mod_base = OTHER; note = 2'-O-methylcytidine-3'- phosphorothioate
  modified_base 2: mod_base = OTHER; note = 2'-fluoroguanosine-3'-phosphorothioate
  modified_base 3: mod_base = OTHER; note = 2'-O-methylcytidine-3'-phosphate
  modified_base 4: mod_base = OTHER; note = 2'-O-methylcytidine-3'-phosphate
  modified_base 5: mod_base = OTHER; note = 2'-O-methyladenosine-3'-phosphate
  modified_base 6: mod_base = OTHER; note = 2'-fluorocytidine-3'-phosphate
  modified_base 7: mod_base = OTHER; note = 2'-O-methyluridine-3'-phosphate
  modified_base 8: mod_base = OTHER; note = 2'-fluorouridine-3'-phosphate
  modified_base 9: mod_base = OTHER; note = 2'-fluorocytidine-3'-phosphate
  modified_base 10: mod_base = OTHER; note = 2'-O-methyluridine-3'-phosphate
  modified_base 11: mod_base = OTHER; note = 2'-O-methyluridine-3'-phosphate
  modified_base 12: mod_base = OTHER; note = 2'-O-methylcytidine-3'-phosphate
  modified_base 13: mod_base = OTHER; note = 2'-O-methyladenosine-3'-phosphate
  modified_base 14: mod_base = OTHER; note = 2'-fluoroadenosine-3'-phosphate
  modified_base 15: mod_base = OTHER; note = 2'-O-methyluridine-3'-phosphate
  modified_base 16: mod_base = OTHER; note = 2'-fluorouridine-3'-phosphate
  modified_base 17: mod_base = OTHER; note = 2'-O-methylguanosine-3'-phosphate
  modified_base 18: mod_base = OTHER; note = 2'-O-methyladenosine-3'-phosphate
  modified_base 19: mod_base = OTHER; note = 2'-O-methylguanosine-3'-phosphate
  modified_base 20: mod_base = OTHER; note = 2'-O-methylguanosine-3'-phosphate
  modified_base 21: mod_base = OTHER; note = 2'-O-methyladenosine-3'- phosphorothioate
  modified_base 22: mod_base = OTHER; note = 2'-O-methylguanosine-3'- phosphorothioate
  modified_base 23: mod_base = OTHER; note = 2'-O-methylguanosine-3'-phosphate
cgccacttcttcaattgaggagg

SEQ ID NO: 2924 - RNA, 21 nt, synthetic construct
  source 1..21: mol_type = other RNA
  modified_base 1: mod_base = OTHER; note = 2'-O-methylcytidine-3'- phosphorothioate
  modified_base 2: mod_base = OTHER; note = 2'-O-methylcytidine-3'- phosphorothioate
  modified_base 3: mod_base = OTHER; note = 2'-O-methyluridine-3'-phosphate
  modified_base 4: mod_base = OTHER; note = 2'-O-methylcytidine-3'-phosphate
  modified_base 5: mod_base = OTHER; note = 2'-O-methyladenosine-3'-phosphate
  modified_base 6: mod_base = OTHER; note = 2'-O-methyladenosine-3'-phosphate
  modified_base 7: mod_base = OTHER; note = 2'-fluorouridine-3'-phosphate
  modified_base 8: mod_base = OTHER; note = 2'-O-methyluridine-3'-phosphate
  modified_base 9: mod_base = OTHER; note = 2'-fluoroguanosine-3'-phosphate
  modified_base 10: mod_base = OTHER; note = 2'-fluoroadenosine-3'-phosphate
  modified_base 11: mod_base = OTHER; note = 2'-fluoroadenosine-3'-phosphate
  modified_base 12: mod_base = OTHER; note = 2'-O-methylguanosine-3'-phosphate
  modified_base 13: mod_base = OTHER; note = 2'-O-methyladenosine-3'-phosphate
  modified_base 14: mod_base = OTHER; note = 2'-O-methyladenosine-3'-phosphate
  modified_base 15: mod_base = OTHER; note = 2'-O-methylguanosine-3'-phosphate
  modified_base 16: mod_base = OTHER; note = 2'-O-methyluridine-3'-phosphate
  modified_base 17: mod_base = OTHER; note = 2'-O-methylguanosine-3'-phosphate
  modified_base 18: mod_base = OTHER; note = 2'-O-methylguanosine-3'-phosphate
  modified_base 19: mod_base = OTHER; note = 2'-O-methylcytidine-3'-phosphate
  modified_base 20: mod_base = OTHER; note = 2'-O-methylguanosine-3'-phosphate
  modified_base 21: mod_base = OTHER; note 2'-O-methylguanosine-3'-phosphate-N-[tris(GalNAc-alkyl)-ami dodecanoyl)]-4-hydroxyprolinol (Hyp-(GalNAc-alkyl)3)
cctcaattgaagaagtggcgg

SEQ ID NO: 2925 - RNA, 23 nt, synthetic construct
  source 1..23: mol_type = other RNA
  modified_base 1: mod_base = OTHER; note = 2'-O-methylcytidine-3'- phosphorothioate
  modified_base 2: mod_base = OTHER; note = 2'-fluorocytidine-3'-phosphorothioate
  modified_base 3: mod_base = OTHER; note = 2'-O-methylguanosine-3'-phosphate
  modified_base 4: mod_base = OTHER; note = 2'-O-methylcytidine-3'-phosphate
  modified_base 5: mod_base = OTHER; note = 2'-O-methylcytidine-3'-phosphate
  modified_base 6: mod_base = OTHER; note = 2'-fluoroadenosine-3'-phosphate
  modified_base 7: mod_base = OTHER; note = 2'-O-methylcytidine-3'-phosphate
  modified_base 8: mod_base = OTHER; note = 2'-fluorouridine-3'-phosphate
  modified_base 9: mod_base = OTHER; note = 2'-fluorouridine-3'-phosphate
  modified_base 10: mod_base = OTHER; note = 2'-O-methylcytidine-3'-phosphate
  modified_base 11: mod_base = OTHER; note = 2'-O-methyluridine-3'-phosphate
  modified_base 12: mod_base = OTHER; note = 2'-O-methyluridine-3'-phosphate
  modified_base 13: mod_base = OTHER; note = 2'-O-methylcytidine-3'-phosphate
  modified_base 14: mod_base = OTHER; note = 2'-fluoroadenosine-3'-phosphate
  modified_base 15: mod_base = OTHER; note = 2'-O-methyladenosine-3'-phosphate
  modified_base 16: mod_base = OTHER; note = 2'-fluorouridine-3'-phosphate
  modified_base 17: mod_base = OTHER; note = 2'-O-methyluridine-3'-phosphate
  modified_base 18: mod_base = OTHER; note = 2'-O-methylguanosine-3'-phosphate
  modified_base 19: mod_base = OTHER; note = 2'-O-methyladenosine-3'-phosphate
  modified_base 20: mod_base = OTHER; note = 2'-O-methylguanosine-3'-phosphate
  modified_base 21: mod_base = OTHER; note = 2'-O-methylguanosine-3'- phosphorothioate
  modified_base 22: mod_base = OTHER; note = 2'-O-methyladenosine-3'- phosphorothioate
  modified_base 23: mod_base = OTHER; note = 2'-O-methylguanosine-3'-phosphate
ccgccacttcttcaattgaggag

SEQ ID NO: 2926 - RNA, 21 nt, synthetic construct
  source 1..21: mol_type = other RNA
  modified_base 1: mod_base = OTHER; note = 2'-O-methylcytidine-3'- phosphorothioate
  modified_base 2: mod_base = OTHER; note = 2'-O-methyladenosine-3'- phosphorothioate
  modified_base 3: mod_base = OTHER; note = 2'-O-methylcytidine-3'-phosphate
  modified_base 4: mod_base = OTHER; note = 2'-O-methylcytidine-3'-phosphate
  modified_base 5: mod_base = OTHER; note = 2'-O-methyluridine-3'-phosphate
  modified_base 6: mod_base = OTHER; note = 2'-O-methylcytidine-3'-phosphate
  modified_base 7: mod_base = OTHER; note = 2'-fluorocytidine-3'-phosphate
  modified_base 8: mod_base = OTHER; note = 2'-O-methyluridine-3'-phosphate
  modified_base 9: mod_base = OTHER; note = 2'-fluorocytidine-3'-phosphate
  modified_base 10: mod_base = OTHER; note = 2'-fluoroadenosine-3'-phosphate
  modified_base 11: mod_base = OTHER; note = 2'-fluoroadenosine-3'-phosphate
  modified_base 12: mod_base = OTHER; note = 2'-O-methyluridine-3'-phosphate
  modified_base 13: mod_base = OTHER; note = 2'-O-methyluridine-3'-phosphate
  modified_base 14: mod_base = OTHER; note = 2'-O-methylguanosine-3'-phosphate
  modified_base 15: mod_base = OTHER; note = 2'-O-methyladenosine-3'-phosphate
  modified_base 16: mod_base = OTHER; note = 2'-O-methyladenosine-3'-phosphate
  modified_base 17: mod_base = OTHER; note = 2'-O-methylguanosine-3'-phosphate
  modified_base 18: mod_base = OTHER; note = 2'-O-methyladenosine-3'-phosphate
  modified_base 19: mod_base = OTHER; note = 2'-O-methyladenosine-3'-phosphate
  modified_base 20: mod_base = OTHER; note = 2'-O-methylguanosine-3'-phosphate
  modified_base 21: mod_base = OTHER; note 2'-O-methyluridine-3'-phosphate-N-[tris(GalNAc-alkyl)-amido decanoyl)]-4-hydroxyprolinol (Hyp-(GalNAc-alkyl)3)
cacctcctcaattgaagaagt

SEQ ID NO: 2927 - RNA, 23 nt, synthetic construct
  source 1..23: mol_type = other RNA
  modified_base 1: mod_base = OTHER; note = 2'-O-methyladenosine-3'- phosphorothioate
  modified_base 2: mod_base = OTHER; note = 2'-fluorocytidine-3'-phosphorothioate
  modified_base 3: mod_base = OTHER; note = 2'-O-methyluridine-3'-phosphate
  modified_base 4: mod_base = OTHER; note = 2'-O-methyluridine-3'-phosphate
  modified_base 5: mod_base = OTHER; note = 2'-O-methylcytidine-3'-phosphate
  modified_base 6: mod_base = OTHER; note = 2'-fluorouridine-3'-phosphate
  modified_base 7: mod_base = OTHER; note = 2'-O-methyluridine-3'-phosphate
  modified_base 8: mod_base = OTHER; note = 2'-fluorocytidine-3'-phosphate
  modified_base 9: mod_base = OTHER; note = 2'-fluoroadenosine-3'-phosphate
  modified_base 10: mod_base = OTHER; note = 2'-O-methyladenosine-3'-phosphate
  modified_base 11: mod_base = OTHER; note = 2'-O-methyluridine-3'-phosphate
  modified_base 12: mod_base = OTHER; note = 2'-O-methyluridine-3'-phosphate
  modified_base 13: mod_base = OTHER; note = 2'-O-methylguanosine-3'-phosphate
  modified_base 14: mod_base = OTHER; note = 2'-fluoroadenosine-3'-phosphate
  modified_base 15: mod_base = OTHER; note = 2'-O-methylguanosine-3'-phosphate
  modified_base 16: mod_base = OTHER; note = 2'-fluoroguanosine-3'-phosphate
  modified_base 17: mod_base = OTHER; note = 2'-O-methyladenosine-3'-phosphate
  modified_base 18: mod_base = OTHER; note = 2'-O-methylguanosine-3'-phosphate
  modified_base 19: mod_base = OTHER; note = 2'-O-methylguanosine-3'-phosphate
  modified_base 20: mod_base = OTHER; note = 2'-O-methyluridine-3'-phosphate
  modified_base 21: mod_base = OTHER; note = 2'-O-methylguanosine-3'- phosphorothioate
  modified_base 22: mod_base = OTHER; note = 2'-O-methylguanosine-3'- phosphorothioate
  modified_base 23: mod_base = OTHER; note = 2'-O-methylcytidine-3'-phosphate
acttcttcaattgaggaggtggc

SEQ ID NO: 2928 - RNA, 21 nt, synthetic construct
  source 1..21: mol_type = other RNA
  modified_base 1: mod_base = OTHER; note = 2'-O-methylcytidine-3'- phosphorothioate
  modified_base 2: mod_base = OTHER; note = 2'-O-methylcytidine-3'- phosphorothioate
  modified_base 3: mod_base = OTHER; note = 2'-O-methyladenosine-3'-phosphate
  modified_base 4: mod_base = OTHER; note = 2'-O-methylcytidine-3'-phosphate
  modified_base 5: mod_base = OTHER; note = 2'-O-methylcytidine-3'-phosphate
  modified_base 6: mod_base = OTHER; note = 2'-O-methyluridine-3'-phosphate
  modified_base 7: mod_base = OTHER; note = 2'-fluorocytidine-3'-phosphate
  modified_base 8: mod_base = OTHER; note = 2'-O-methylcytidine-3'-phosphate
  modified_base 9: mod_base = OTHER; note = 2'-fluorouridine-3'-phosphate
  modified_base 10: mod_base = OTHER; note = 2'-fluorocytidine-3'-phosphate
  modified_base 11: mod_base = OTHER; note = 2'-fluoroadenosine-3'-phosphate
  modified_base 12: mod_base = OTHER; note = 2'-O-methyladenosine-3'-phosphate
  modified_base 13: mod_base = OTHER; note = 2'-O-methyluridine-3'-phosphate
  modified_base 14: mod_base = OTHER; note = 2'-O-methyluridine-3'-phosphate
  modified_base 15: mod_base = OTHER; note = 2'-O-methylguanosine-3'-phosphate
  modified_base 16: mod_base = OTHER; note = 2'-O-methyladenosine-3'-phosphate
  modified_base 17: mod_base = OTHER; note = 2'-O-methyladenosine-3'-phosphate
  modified_base 18: mod_base = OTHER; note = 2'-O-methylguanosine-3'-phosphate
  modified_base 19: mod_base = OTHER; note = 2'-O-methyladenosine-3'-phosphate
  modified_base 20: mod_base = OTHER; note = 2'-O-methyladenosine-3'-phosphate
  modified_base 21: mod_base = OTHER; note 2'-O-methylguanosine-3'-phosphate-N-[tris(GalNAc-alkyl)-ami dodecanoyl)]-4-hydroxyprolinol (Hyp-(GalNAc-alkyl)3)
ccacctcctcaattgaagaag

SEQ ID NO: 2929 - RNA, 23 nt, synthetic construct
  source 1..23: mol_type = other RNA
  modified_base 1: mod_base = OTHER; note = 2'-O-methylcytidine-3'- phosphorothioate
  modified_base 2: mod_base = OTHER; note = 2'-fluorouridine -3'-phosphorothioate
  modified_base 3: mod_base = OTHER; note = 2'-O-methyluridine-3'-phosphate
  modified_base 4: mod_base = OTHER; note = 2'-O-methylcytidine-3'-phosphate
  modified_base 5: mod_base = OTHER; note = 2'-O-methyluridine-3'-phosphate
  modified_base 6: mod_base = OTHER; note = 2'-fluorouridine-3'-phosphate
  modified_base 7: mod_base = OTHER; note = 2'-O-methylcytidine-3'-phosphate
  modified_base 8: mod_base = OTHER; note = 2'-fluoroadenosine-3'-phosphate
  modified_base 9: mod_base = OTHER; note = 2'-fluoroadenosine-3'-phosphate
  modified_base 10: mod_base = OTHER; note = 2'-O-methyluridine-3'-phosphate
  modified_base 11: mod_base = OTHER; note = 2'-O-methyluridine-3'-phosphate
  modified_base 12: mod_base = OTHER; note = 2'-O-methylguanosine-3'-phosphate
  modified_base 13: mod_base = OTHER; note = 2'-O-methyladenosine-3'-phosphate
  modified_base 14: mod_base = OTHER; note = 2'-fluoroguanosine-3'-phosphate
  modified_base 15: mod_base = OTHER; note = 2'-O-methylguanosine-3'-phosphate
  modified_base 16: mod_base = OTHER; note = 2'-fluoroadenosine-3'-phosphate
  modified_base 17: mod_base = OTHER; note = 2'-O-methylguanosine-3'-phosphate
  modified_base 18: mod_base = OTHER; note = 2'-O-methylguanosine-3'-phosphate
  modified_base 19: mod_base = OTHER; note = 2'-O-methyluridine-3'-phosphate
  modified_base 20: mod_base = OTHER; note = 2'-O-methylguanosine-3'-phosphate
  modified_base 21: mod_base = OTHER; note = 2'-O-methylguanosine-3'- phosphorothioate
  modified_base 22: mod_base = OTHER; note = 2'-O-methylcytidine-3'- phosphorothioate
  modified_base 23: mod_base = OTHER; note = 2'-O-methylcytidine-3'-phosphate
cttcttcaattgaggaggtggcc

SEQ ID NO: 2930 - RNA, 21 nt, synthetic construct
  source 1..21: mol_type = other RNA
  modified_base 1: mod_base = OTHER; note = 2'-O-methylcytidine-3'- phosphorothioate
  modified_base 2: mod_base = OTHER; note = 2'-O-methyladenosine-3'- phosphorothioate
  modified_base 3: mod_base = OTHER; note = 2'-O-methyladenosine-3'-phosphate
  modified_base 4: mod_base = OTHER; note = 2'-O-methylguanosine-3'-phosphate
  modified_base 5: mod_base = OTHER; note = 2'-O-methyladenosine-3'-phosphate
  modified_base 6: mod_base = OTHER; note = 2'-O-methyluridine-3'-phosphate
  modified_base 7: mod_base = OTHER; note = 2'-fluoroguanosine-3'-phosphate
  modified_base 8: mod_base = OTHER; note = 2'-O-methyluridine-3'-phosphate
  modified_base 9: mod_base = OTHER; note = 2'-fluorocytidine-3'-phosphate
  modified_base 10: mod_base = OTHER; note = 2'-fluorocytidine-3'-phosphate
  modified_base 11: mod_base = OTHER; note = 2'-fluorouridine-3'-phosphate
  modified_base 12: mod_base = OTHER; note = 2'-O-methylcytidine-3'-phosphate
  modified_base 13: mod_base = OTHER; note = 2'-O-methylguanosine-3'-phosphate
  modified_base 14: mod_base = OTHER; note = 2'-O-methyladenosine-3'-phosphate
  modified_base 15: mod_base = OTHER; note = 2'-O-methylguanosine-3'-phosphate
  modified_base 16: mod_base = OTHER; note = 2'-O-methyladenosine-3'-phosphate
  modified_base 17: mod_base = OTHER; note = 2'-O-methyluridine-3'-phosphate
  modified_base 18: mod_base = OTHER; note = 2'-O-methyladenosine-3'-phosphate
  modified_base 19: mod_base = OTHER; note = 2'-O-methylcytidine-3'-phosphate
  modified_base 20: mod_base = OTHER; note = 2'-O-methyluridine-3'-phosphate
  modified_base 21: mod_base = OTHER; note 2'-O-methyladenosine-3'-phosphate-N-[tris(GalNAc-alkyl)-ami dodecanoyl)]-4-hydroxyprolinol (Hyp-(GalNAc-alkyl)3)
caagatgtcctcgagatacta

SEQ ID NO: 2931 - RNA, 23 nt, synthetic construct
  source 1..23: mol_type = other RNA
  modified_base 1: mod_base = OTHER; note = 2'-O-methyluridine-3'-phosphorothioate
  modified_base 2: mod_base = OTHER; note = 2'-fluoroadenosine-3'-phosphorothioate
  modified_base 3: mod_base = OTHER; note = 2'-O-methylguanosine-3'-phosphate
  modified_base 4: mod_base = OTHER; note = 2'-O-methyluridine-3'-phosphate
  modified_base 5: mod_base = OTHER; note = 2'-O-methyladenosine-3'-phosphate
  modified_base 6: mod_base = OTHER; note = 2'-fluorouridine-3'-phosphate
  modified_base 7: mod_base = OTHER; note = 2'-O-methylcytidine-3'-phosphate
  modified_base 8: mod_base = OTHER; note = 2'-fluorouridine-3'-phosphate
  modified_base 9: mod_base = OTHER; note = 2'-fluorocytidine-3'-phosphate
  modified_base 10: mod_base = OTHER; note = 2'-O-methylguanosine-3'-phosphate
  modified_base 11: mod_base = OTHER; note = 2'-O-methyladenosine-3'-phosphate
  modified_base 12: mod_base = OTHER; note = 2'-O-methylguanosine-3'-phosphate
  modified_base 13: mod_base = OTHER; note = 2'-O-methylguanosine-3'-phosphate
  modified_base 14: mod_base = OTHER; note = 2'-fluoroadenosine-3'-phosphate
  modified_base 15: mod_base = OTHER; note = 2'-O-methylcytidine-3'-phosphate
  modified_base 16: mod_base = OTHER; note = 2'-fluoroadenosine-3'-phosphate
  modified_base 17: mod_base = OTHER; note = 2'-O-methyluridine-3'-phosphate
  modified_base 18: mod_base = OTHER; note = 2'-O-methylcytidine-3'-phosphate
  modified_base 19: mod_base = OTHER; note = 2'-O-methyluridine-3'-phosphate
  modified_base 20: mod_base = OTHER; note = 2'-O-methyluridine-3'-phosphate
  modified_base 21: mod_base = OTHER; note = 2'-O-methylguanosine-3'- phosphorothioate
  modified_base 22: mod_base = OTHER; note = 2'-O-methyladenosine-3'- phosphorothioate
  modified_base 23: mod_base = OTHER; note = 2'-O-methyladenosine-3'-phosphate
tagtatctcgaggacatcttgaa

SEQ ID NO: 2932 - RNA, 21 nt, synthetic construct
  source 1..21: mol_type = other RNA
  modified_base 1: mod_base = OTHER; note = 2'-O-methyladenosine-3'- phosphorothioate
  modified_base 2: mod_base = OTHER; note = 2'-O-methyladenosine-3'- phosphorothioate
  modified_base 3: mod_base = OTHER; note = 2'-O-methylguanosine-3'-phosphate
  modified_base 4: mod_base = OTHER; note = 2'-O-methyladenosine-3'-phosphate
  modified_base 5: mod_base = OTHER; note = 2'-O-methyluridine-3'-phosphate
  modified_base 6: mod_base = OTHER; note = 2'-O-methylguanosine-3'-phosphate
  modified_base 7: mod_base = OTHER; note = 2'-fluorouridine-3'-phosphate
  modified_base 8: mod_base = OTHER; note = 2'-O-methylcytidine-3'-phosphate
  modified_base 9: mod_base = OTHER; note = 2'-fluorocytidine-3'-phosphate
  modified_base 10: mod_base = OTHER; note = 2'-fluorouridine-3'-phosphate
  modified_base 11: mod_base = OTHER; note = 2'-fluorocytidine-3'-phosphate
  modified_base 12: mod_base = OTHER; note = 2'-O-methylguanosine-3'-phosphate
  modified_base 13: mod_base = OTHER; note = 2'-O-methyladenosine-3'-phosphate
  modified_base 14: mod_base = OTHER; note = 2'-O-methylguanosine-3'-phosphate
  modified_base 15: mod_base = OTHER; note = 2'-O-methyladenosine-3'-phosphate
  modified_base 16: mod_base = OTHER; note = 2'-O-methyluridine-3'-phosphate
  modified_base 17: mod_base = OTHER; note = 2'-O-methyladenosine-3'-phosphate
  modified_base 18: mod_base = OTHER; note = 2'-O-methylcytidine-3'-phosphate
  modified_base 19: mod_base = OTHER; note = 2'-O-methyluridine-3'-phosphate
  modified_base 20: mod_base = OTHER; note = 2'-O-methyladenosine-3'-phosphate
  modified_base 21: mod_base = OTHER; note 2'-O-methyladenosine-3'-phosphate-N-[tris(GalNAc-alkyl)-ami dodecanoyl)]-4-hydroxyprolinol (Hyp-(GalNAc-alkyl)3)
aagatgtcctcgagatactaa

SEQ ID NO: 2933 - RNA, 23 nt, synthetic construct
  source 1..23: mol_type = other RNA
  modified_base 1: mod_base = OTHER; note = 2'-O-methyluridine-3'-phosphorothioate
  modified_base 2: mod_base = OTHER; note = 2'-fluorouridine -3'-phosphorothioate
  modified_base 3: mod_base = OTHER; note = 2'-O-methyladenosine-3'-phosphate
  modified_base 4: mod_base = OTHER; note = 2'-O-methylguanosine-3'-phosphate
  modified_base 5: mod_base = OTHER; note = 2'-O-methyluridine-3'-phosphate
  modified_base 6: mod_base = OTHER; note = 2'-fluoroadenosine-3'-phosphate
  modified_base 7: mod_base = OTHER; note = 2'-O-methyluridine-3'-phosphate
  modified_base 8: mod_base = OTHER; note = 2'-fluorocytidine-3'-phosphate
  modified_base 9: mod_base = OTHER; note = 2'-fluorouridine-3'-phosphate
  modified_base 10: mod_base = OTHER; note = 2'-O-methylcytidine-3'-phosphate
  modified_base 11: mod_base = OTHER; note = 2'-O-methylguanosine-3'-phosphate
  modified_base 12: mod_base = OTHER; note = 2'-O-methyladenosine-3'-phosphate
  modified_base 13: mod_base = OTHER; note = 2'-O-methylguanosine-3'-phosphate
  modified_base 14: mod_base = OTHER; note = 2'-fluoroguanosine-3'-phosphate
  modified_base 15: mod_base = OTHER; note = 2'-O-methyladenosine-3'-phosphate
  modified_base 16: mod_base = OTHER; note = 2'-fluorocytidine-3'-phosphate
  modified_base 17: mod_base = OTHER; note = 2'-O-methyladenosine-3'-phosphate
  modified_base 18: mod_base = OTHER; note = 2'-O-methyluridine-3'-phosphate
  modified_base 19: mod_base = OTHER; note = 2'-O-methylcytidine-3'-phosphate
  modified_base 20: mod_base = OTHER; note = 2'-O-methyluridine-3'-phosphate
  modified_base 21: mod_base = OTHER; note = 2'-O-methyluridine-3'-phosphorothioate
  modified_base 22: mod_base = OTHER; note = 2'-O-methylguanosine-3'- phosphorothioate
  modified_base 23: mod_base = OTHER; note = 2'-O-methyladenosine-3'-phosphate
ttagtatctcgaggacatcttga

SEQ ID NO: 2934 - RNA, 21 nt, synthetic construct
  source 1..21: mol_type = other RNA
  modified_base 1: mod_base = OTHER; note = 2'-O-methyluridine-3'-phosphorothioate
  modified_base 2: mod_base = OTHER; note = 2'-O-methylguanosine-3'- phosphorothioate
  modified_base 3: mod_base = OTHER; note = 2'-O-methyluridine-3'-phosphate
  modified_base 4: mod_base = OTHER; note = 2'-O-methyluridine-3'-phosphate
  modified_base 5: mod_base = OTHER; note = 2'-O-methylcytidine-3'-phosphate
  modified_base 6: mod_base = OTHER; note = 2'-O-methyladenosine-3'-phosphate
  modified_base 7: mod_base = OTHER; note = 2'-fluoroadenosine-3'-phosphate
  modified_base 8: mod_base = OTHER; note = 2'-O-methylguanosine-3'-phosphate
  modified_base 9: mod_base = OTHER; note = 2'-fluoroadenosine-3'-phosphate
  modified_base 10: mod_base = OTHER; note = 2'-fluorouridine-3'-phosphate
  modified_base 11: mod_base = OTHER; note = 2'-fluoroguanosine-3'-phosphate
  modified_base 12: mod_base = OTHER; note = 2'-O-methyluridine-3'-phosphate
  modified_base 13: mod_base = OTHER; note = 2'-O-methylcytidine-3'-phosphate
  modified_base 14: mod_base = OTHER; note = 2'-O-methylcytidine-3'-phosphate
  modified_base 15: mod_base = OTHER; note = 2'-O-methyluridine-3'-phosphate
  modified_base 16: mod_base = OTHER; note = 2'-O-methylcytidine-3'-phosphate
  modified_base 17: mod_base = OTHER; note = 2'-O-methylguanosine-3'-phosphate
  modified_base 18: mod_base = OTHER; note = 2'-O-methyladenosine-3'-phosphate
  modified_base 19: mod_base = OTHER; note = 2'-O-methylguanosine-3'-phosphate
  modified_base 20: mod_base = OTHER; note = 2'-O-methyladenosine-3'-phosphate
  modified_base 21: mod_base = OTHER; note 2'-O-methyluridine-3'-phosphate-N-[tris(GalNAc-alkyl)-amido decanoyl)]-4-hydroxyprolinol (Hyp-(GalNAc-alkyl)3)
tgttcaagatgtcctcgagat

SEQ ID NO: 2935 - RNA, 23 nt, synthetic construct
  source 1..23: mol_type = other RNA
  modified_base 1: mod_base = OTHER; note = 2'-O-methyladenosine-3'- phosphorothioate
  modified_base 2: mod_base = OTHER; note = 2'-fluorouridine -3'-phosphorothioate
  modified_base 3: mod_base = OTHER; note = 2'-O-methylcytidine-3'-phosphate
  modified_base 4: mod_base = OTHER; note = 2'-O-methyluridine-3'-phosphate
  modified_base 5: mod_base = OTHER; note = 2'-O-methylcytidine-3'-phosphate
  modified_base 6: mod_base = OTHER; note = 2'-fluoroguanosine-3'-phosphate
  modified_base 7: mod_base = OTHER; note = 2'-O-methyladenosine-3'-phosphate
  modified_base 8: mod_base = OTHER; note = 2'-fluoroguanosine-3'-phosphate
  modified_base 9: mod_base = OTHER; note = 2'-fluoroguanosine-3'-phosphate
  modified_base 10: mod_base = OTHER; note = 2'-O-methyladenosine-3'-phosphate
  modified_base 11: mod_base = OTHER; note = 2'-O-methylcytidine-3'-phosphate
  modified_base 12: mod_base = OTHER; note = 2'-O-methyladenosine-3'-phosphate
  modified_base 13: mod_base = OTHER; note = 2'-O-methyluridine-3'-phosphate
  modified_base 14: mod_base = OTHER; note = 2'-fluorocytidine-3'-phosphate
  modified_base 15: mod_base = OTHER; note = 2'-O-methyluridine-3'-phosphate
  modified_base 16: mod_base = OTHER; note = 2'-fluorouridine-3'-phosphate
  modified_base 17: mod_base = OTHER; note = 2'-O-methylguanosine-3'-phosphate
  modified_base 18: mod_base = OTHER; note = 2'-O-methyladenosine-3'-phosphate
  modified_base 19: mod_base = OTHER; note = 2'-O-methyladenosine-3'-phosphate
  modified_base 20: mod_base = OTHER; note = 2'-O-methylcytidine-3'-phosphate
  modified_base 21: mod_base = OTHER; note = 2'-O-methyladenosine-3'- phosphorothioate
  modified_base 22: mod_base = OTHER; note = 2'-O-methylcytidine-3'- phosphorothioate
  modified_base 23: mod_base = OTHER; note = 2'-O-methylcytidine-3'-phosphate
atctcgaggacatcttgaacacc

SEQ ID NO: 2936 - RNA, 21 nt, synthetic construct
  source 1..21: mol_type = other RNA
  modified_base 1: mod_base = OTHER; note = 2'-O-methylguanosine-3'- phosphorothioate
  modified_base 2: mod_base = OTHER; note = 2'-O-methyluridine-3'-phosphorothioate
  modified_base 3: mod_base = OTHER; note = 2'-O-methylguanosine-3'-phosphate
  modified_base 4: mod_base = OTHER; note = 2'-O-methyluridine-3'-phosphate
  modified_base 5: mod_base = OTHER; note = 2'-O-methyluridine-3'-phosphate
  modified_base 6: mod_base = OTHER; note = 2'-O-methylcytidine-3'-phosphate
  modified_base 7: mod_base = OTHER; note = 2'-fluoroadenosine-3'-phosphate
  modified_base 8: mod_base = OTHER; note = 2'-O-methyladenosine-3'-phosphate
  modified_base 9: mod_base = OTHER; note = 2'-fluoroguanosine-3'-phosphate
  modified_base 10: mod_base = OTHER; note = 2'-fluoroadenosine-3'-phosphate
  modified_base 11: mod_base = OTHER; note = 2'-fluorouridine-3'-phosphate
  modified_base 12: mod_base = OTHER; note = 2'-O-methylguanosine-3'-phosphate
  modified_base 13: mod_base = OTHER; note = 2'-O-methyluridine-3'-phosphate
  modified_base 14: mod_base = OTHER; note = 2'-O-methylcytidine-3'-phosphate
  modified_base 15: mod_base = OTHER; note = 2'-O-methylcytidine-3'-phosphate
  modified_base 16: mod_base = OTHER; note = 2'-O-methyluridine-3'-phosphate
  modified_base 17: mod_base = OTHER; note = 2'-O-methylcytidine-3'-phosphate
  modified_base 18: mod_base = OTHER; note = 2'-O-methylguanosine-3'-phosphate
  modified_base 19: mod_base = OTHER; note = 2'-O-methyladenosine-3'-phosphate
  modified_base 20: mod_base = OTHER; note = 2'-O-methylguanosine-3'-phosphate
  modified_base 21: mod_base = OTHER; note 2'-O-methyladenosine-3'-phosphate-N-[tris(GalNAc-alkyl)-ami dodecanoyl)]-4-hydroxyprolinol (Hyp-(GalNAc-alkyl)3)
gtgttcaagatgtcctcgaga

SEQ ID NO: 2937 - RNA, 23 nt, synthetic construct
  source 1..23: mol_type = other RNA
  modified_base 1: mod_base = OTHER; note = 2'-O-methyluridine-3'-phosphorothioate
  modified_base 2: mod_base = OTHER; note = 2'-fluorocytidine-3'-phosphorothioate
  modified_base 3: mod_base = OTHER; note = 2'-O-methyluridine-3'-phosphate
  modified_base 4: mod_base = OTHER; note = 2'-O-methylcytidine-3'-phosphate
  modified_base 5: mod_base = OTHER; note = 2'-O-methylguanosine-3'-phosphate
  modified_base 6: mod_base = OTHER; note = 2'-fluoroadenosine-3'-phosphate
  modified_base 7: mod_base = OTHER; note = 2'-O-methylguanosine-3'-phosphate
  modified_base 8: mod_base = OTHER; note = 2'-fluoroguanosine-3'-phosphate
  modified_base 9: mod_base = OTHER; note = 2'-fluoroadenosine-3'-phosphate
  modified_base 10: mod_base = OTHER; note = 2'-O-methylcytidine-3'-phosphate
  modified_base 11: mod_base = OTHER; note = 2'-O-methyladenosine-3'-phosphate
  modified_base 12: mod_base = OTHER; note = 2'-O-methyluridine-3'-phosphate
  modified_base 13: mod_base = OTHER; note = 2'-O-methylcytidine-3'-phosphate
  modified_base 14: mod_base = OTHER; note = 2'-fluorouridine-3'-phosphate
  modified_base 15: mod_base = OTHER; note = 2'-O-methyluridine-3'-phosphate
  modified_base 16: mod_base = OTHER; note = 2'-fluoroguanosine-3'-phosphate
  modified_base 17: mod_base = OTHER; note = 2'-O-methyladenosine-3'-phosphate
  modified_base 18: mod_base = OTHER; note = 2'-O-methyladenosine-3'-phosphate
  modified_base 19: mod_base = OTHER; note = 2'-O-methylcytidine-3'-phosphate
  modified_base 20: mod_base = OTHER; note = 2'-O-methyladenosine-3'-phosphate
  modified_base 21: mod_base = OTHER; note = 2'-O-methylcytidine-3'- phosphorothioate
  modified_base 22: mod_base = OTHER; note = 2'-O-methylcytidine-3'- phosphorothioate
  modified_base 23: mod_base = OTHER; note = 2'-O-methyluridine-3'-phosphate
tctcgaggacatcttgaacacct

SEQ ID NO: 2938 - RNA, 21 nt, synthetic construct
  source 1..21: mol_type = other RNA
  modified_base 1: mod_base = OTHER; note = 2'-O-methyladenosine-3'- phosphorothioate
  modified_base 2: mod_base = OTHER; note = 2'-O-methylcytidine-3'- phosphorothioate
  modified_base 3: mod_base = OTHER; note = 2'-O-methyladenosine-3'-phosphate
  modified_base 4: mod_base = OTHER; note = 2'-O-methyluridine-3'-phosphate
  modified_base 5: mod_base = OTHER; note = 2'-O-methylguanosine-3'-phosphate
  modified_base 6: mod_base = OTHER; note = 2'-O-methylcytidine-3'-phosphate
  modified_base 7: mod_base = OTHER; note = 2'-fluorouridine-3'-phosphate
  modified_base 8: mod_base = OTHER; note = 2'-O-methyladenosine-3'-phosphate
  modified_base 9: mod_base = OTHER; note = 2'-fluoroadenosine-3'-phosphate
  modified_base 10: mod_base = OTHER; note = 2'-fluoroadenosine-3'-phosphate
  modified_base 11: mod_base = OTHER; note = 2'-fluorouridine-3'-phosphate
  modified_base 12: mod_base = OTHER; note = 2'-O-methylcytidine-3'-phosphate
  modified_base 13: mod_base = OTHER; note = 2'-O-methyladenosine-3'-phosphate
  modified_base 14: mod_base = OTHER; note = 2'-O-methylguanosine-3'-phosphate
  modified_base 15: mod_base = OTHER; note = 2'-O-methyluridine-3'-phosphate
  modified_base 16: mod_base = OTHER; note = 2'-O-methyladenosine-3'-phosphate
  modified_base 17: mod_base = OTHER; note = 2'-O-methylcytidine-3'-phosphate
  modified_base 18: mod_base = OTHER; note = 2'-O-methyluridine-3'-phosphate
  modified_base 19: mod_base = OTHER; note = 2'-O-methyluridine-3'-phosphate
  modified_base 20: mod_base = OTHER; note = 2'-O-methylcytidine-3'-phosphate
  modified_base 21: mod_base = OTHER; note 2'-O-methylcytidine-3'-phosphate-N-[tris(GalNAc-alkyl)-amid odecanoyl)]-4-hydroxyprolinol (Hyp-(GalNAc-alkyl)3)
acatgctaaatcagtacttcc

SEQ ID NO: 2939 - RNA, 23 nt, synthetic construct
  source 1..23: mol_type = other RNA
  modified_base 1: mod_base = OTHER; note = 2'-O-methylguanosine-3'- phosphorothioate
  modified_base 2: mod_base = OTHER; note = 2'-fluoroguanosine-3'-phosphorothioate
  modified_base 3: mod_base = OTHER; note = 2'-O-methyladenosine-3'-phosphate
  modified_base 4: mod_base = OTHER; note = 2'-O-methyladenosine-3'-phosphate
  modified_base 5: mod_base = OTHER; note = 2'-O-methylguanosine-3'-phosphate
  modified_base 6: mod_base = OTHER; note = 2'-fluorouridine-3'-phosphate
  modified_base 7: mod_base = OTHER; note = 2'-O-methyladenosine-3'-phosphate
  modified_base 8: mod_base = OTHER; note = 2'-fluorocytidine-3'-phosphate
  modified_base 9: mod_base = OTHER; note = 2'-fluorouridine-3'-phosphate
  modified_base 10: mod_base = OTHER; note = 2'-O-methylguanosine-3'-phosphate
  modified_base 11: mod_base = OTHER; note = 2'-O-methyladenosine-3'-phosphate
  modified_base 12: mod_base = OTHER; note = 2'-O-methyluridine-3'-phosphate
  modified_base 13: mod_base = OTHER; note = 2'-O-methyluridine-3'-phosphate
  modified_base 14: mod_base = OTHER; note = 2'-fluorouridine-3'-phosphate
  modified_base 15: mod_base = OTHER; note = 2'-O-methyladenosine-3'-phosphate
  modified_base 16: mod_base = OTHER; note = 2'-fluoroguanosine-3'-phosphate
  modified_base 17: mod_base = OTHER; note = 2'-O-methylcytidine-3'-phosphate
  modified_base 18: mod_base = OTHER; note = 2'-O-methyladenosine-3'-phosphate
  modified_base 19: mod_base = OTHER; note = 2'-O-methyluridine-3'-phosphate
  modified_base 20: mod_base = OTHER; note = 2'-O-methylguanosine-3'-phosphate
  modified_base 21: mod_base = OTHER; note = 2'-O-methyluridine-3'-phosphorothioate
  modified_base 22: mod_base = OTHER; note = 2'-O-methyluridine-3'-phosphorothioate
  modified_base 23: mod_base = OTHER; note = 2'-O-methylguanosine-3'-phosphate
ggaagtactgatttagcatgttg

SEQ ID NO: 2940 - RNA, 21 nt, synthetic construct
  source 1..21: mol_type = other RNA
  modified_base 1: mod_base = OTHER; note = 2'-O-methylcytidine-3'- phosphorothioate
  modified_base 2: mod_base = OTHER; note = 2'-O-methyladenosine-3'- phosphorothioate
  modified_base 3: mod_base = OTHER; note = 2'-O-methyluridine-3'-phosphate
  modified_base 4: mod_base = OTHER; note = 2'-O-methylguanosine-3'-phosphate
  modified_base 5: mod_base = OTHER; note = 2'-O-methylcytidine-3'-phosphate
  modified_base 6: mod_base = OTHER; note = 2'-O-methyluridine-3'-phosphate
  modified_base 7: mod_base = OTHER; note = 2'-fluoroadenosine-3'-phosphate
  modified_base 8: mod_base = OTHER; note = 2'-O-methyladenosine-3'-phosphate
  modified_base 9: mod_base = OTHER; note = 2'-fluoroadenosine-3'-phosphate
  modified_base 10: mod_base = OTHER; note = 2'-fluorouridine-3'-phosphate
  modified_base 11: mod_base = OTHER; note = 2'-fluorocytidine-3'-phosphate
  modified_base 12: mod_base = OTHER; note = 2'-O-methyladenosine-3'-phosphate
  modified_base 13: mod_base = OTHER; note = 2'-O-methylguanosine-3'-phosphate
  modified_base 14: mod_base = OTHER; note = 2'-O-methyluridine-3'-phosphate
  modified_base 15: mod_base = OTHER; note = 2'-O-methyladenosine-3'-phosphate
  modified_base 16: mod_base = OTHER; note = 2'-O-methylcytidine-3'-phosphate
  modified_base 17: mod_base = OTHER; note = 2'-O-methyluridine-3'-phosphate
  modified_base 18: mod_base = OTHER; note = 2'-O-methyluridine-3'-phosphate
  modified_base 19: mod_base = OTHER; note = 2'-O-methylcytidine-3'-phosphate
  modified_base 20: mod_base = OTHER; note = 2'-O-methylcytidine-3'-phosphate
  modified_base 21: mod_base = OTHER; note 2'-O-methyladenosine-3'-phosphate-N-[tris(GalNAc-alkyl)-ami dodecanoyl)]-4-hydroxyprolinol (Hyp-(GalNAc-alkyl)3)
catgctaaatcagtacttcca

SEQ ID NO: 2941 - RNA, 23 nt, synthetic construct
  source 1..23: mol_type = other RNA
  modified_base 1: mod_base = OTHER; note = 2'-O-methyluridine-3'-phosphorothioate
  modified_base 2: mod_base = OTHER; note = 2'-fluoroguanosine-3'-phosphorothioate
  modified_base 3: mod_base = OTHER; note = 2'-O-methylguanosine-3'-phosphate
  modified_base 4: mod_base = OTHER; note = 2'-O-methyladenosine-3'-phosphate
  modified_base 5: mod_base = OTHER; note = 2'-O-methyladenosine-3'-phosphate
  modified_base 6: mod_base = OTHER; note = 2'-fluoroguanosine-3'-phosphate
  modified_base 7: mod_base = OTHER; note = 2'-O-methyluridine-3'-phosphate
  modified_base 8: mod_base = OTHER; note = 2'-fluoroadenosine-3'-phosphate
  modified_base 9: mod_base = OTHER; note = 2'-fluorocytidine-3'-phosphate
  modified_base 10: mod_base = OTHER; note = 2'-O-methyluridine-3'-phosphate
  modified_base 11: mod_base = OTHER; note = 2'-O-methylguanosine-3'-phosphate
  modified_base 12: mod_base = OTHER; note = 2'-O-methyladenosine-3'-phosphate
  modified_base 13: mod_base = OTHER; note = 2'-O-methyluridine-3'-phosphate
  modified_base 14: mod_base = OTHER; note = 2'-fluorouridine-3'-phosphate
  modified_base 15: mod_base = OTHER; note = 2'-O-methyluridine-3'-phosphate
  modified_base 16: mod_base = OTHER; note = 2'-fluoroadenosine-3'-phosphate
  modified_base 17: mod_base = OTHER; note = 2'-O-methylguanosine-3'-phosphate
  modified_base 18: mod_base = OTHER; note = 2'-O-methylcytidine-3'-phosphate
  modified_base 19: mod_base = OTHER; note = 2'-O-methyladenosine-3'-phosphate
  modified_base 20: mod_base = OTHER; note = 2'-O-methyluridine-3'-phosphate
  modified_base 21: mod_base = OTHER; note = 2'-O-methylguanosine-3'- phosphorothioate
  modified_base 22: mod_base = OTHER; note = 2'-O-methyluridine-3'-phosphorothioate
  modified_base 23: mod_base = OTHER; note = 2'-O-methyluridine-3'-phosphate
tggaagtactgatttagcatgtt

SEQ ID NO: 2942 - RNA, 21 nt, synthetic construct
  source 1..21: mol_type = other RNA
  modified_base 1: mod_base = OTHER; note = 2'-O-methyladenosine-3'- phosphorothioate
  modified_base 2: mod_base = OTHER; note = 2'-O-methyladenosine-3'- phosphorothioate
  modified_base 3: mod_base = OTHER; note = 2'-O-methylcytidine-3'-phosphate
  modified_base 4: mod_base = OTHER; note = 2'-O-methyladenosine-3'-phosphate
  modified_base 5: mod_base = OTHER; note = 2'-O-methyladenosine-3'-phosphate
  modified_base 6: mod_base = OTHER; note = 2'-O-methylcytidine-3'-phosphate
  modified_base 7: mod_base = OTHER; note = 2'-fluoroadenosine-3'-phosphate
  modified_base 8: mod_base = OTHER; note = 2'-O-methyluridine-3'-phosphate
  modified_base 9: mod_base = OTHER; note = 2'-fluoroguanosine-3'-phosphate
  modified_base 10: mod_base = OTHER; note = 2'-fluorocytidine-3'-phosphate
  modified_base 11: mod_base = OTHER; note = 2'-fluorouridine-3'-phosphate
  modified_base 12: mod_base = OTHER; note = 2'-O-methyladenosine-3'-phosphate
  modified_base 13: mod_base = OTHER; note = 2'-O-methyladenosine-3'-phosphate
  modified_base 14: mod_base = OTHER; note = 2'-O-methyladenosine-3'-phosphate
  modified_base 15: mod_base = OTHER; note = 2'-O-methyluridine-3'-phosphate
  modified_base 16: mod_base = OTHER; note = 2'-O-methylcytidine-3'-phosphate
  modified_base 17: mod_base = OTHER; note = 2'-O-methyladenosine-3'-phosphate
  modified_base 18: mod_base = OTHER; note = 2'-O-methylguanosine-3'-phosphate
  modified_base 19: mod_base = OTHER; note = 2'-O-methyluridine-3'-phosphate
  modified_base 20: mod_base = OTHER; note = 2'-O-methyladenosine-3'-phosphate
  modified_base 21: mod_base = OTHER; note 2'-O-methylcytidine-3'-phosphate-N-[tris(GalNAc-alkyl)-amid odecanoyl)]-4-hydroxyprolinol (Hyp-(GalNAc-alkyl)3)
aacaacatgctaaatcagtac

SEQ ID NO: 2943 - RNA, 23 nt, synthetic construct
  source 1..23: mol_type = other RNA
  modified_base 1: mod_base = OTHER; note = 2'-O-methylguanosine-3'- phosphorothioate
  modified_base 2: mod_base = OTHER; note = 2'-fluorouridine -3'-phosphorothioate
  modified_base 3: mod_base = OTHER; note = 2'-O-methyladenosine-3'-phosphate
  modified_base 4: mod_base = OTHER; note = 2'-O-methylcytidine-3'-phosphate
  modified_base 5: mod_base = OTHER; note = 2'-O-methyluridine-3'-phosphate
  modified_base 6: mod_base = OTHER; note = 2'-fluoroguanosine-3'-phosphate
  modified_base 7: mod_base = OTHER; note = 2'-O-methyladenosine-3'-phosphate
  modified_base 8: mod_base = OTHER; note = 2'-fluorouridine-3'-phosphate
  modified_base 9: mod_base = OTHER; note = 2'-fluorouridine-3'-phosphate
  modified_base 10: mod_base = OTHER; note = 2'-O-methyluridine-3'-phosphate
  modified_base 11: mod_base = OTHER; note = 2'-O-methyladenosine-3'-phosphate
  modified_base 12: mod_base = OTHER; note = 2'-O-methylguanosine-3'-phosphate
  modified_base 13: mod_base = OTHER; note = 2'-O-methylcytidine-3'-phosphate
  modified_base 14: mod_base = OTHER; note = 2'-fluoroadenosine-3'-phosphate
  modified_base 15: mod_base = OTHER; note = 2'-O-methyluridine-3'-phosphate
  modified_base 16: mod_base = OTHER; note = 2'-fluoroguanosine-3'-phosphate
  modified_base 17: mod_base = OTHER; note = 2'-O-methyluridine-3'-phosphate
  modified_base 18: mod_base = OTHER; note = 2'-O-methyluridine-3'-phosphate
  modified_base 19: mod_base = OTHER; note = 2'-O-methylguanosine-3'-phosphate
  modified_base 20: mod_base = OTHER; note = 2'-O-methyluridine-3'-phosphate
  modified_base 21: mod_base = OTHER; note = 2'-O-methyluridine-3'-phosphorothioate
  modified_base 22: mod_base = OTHER; note = 2'-O-methylcytidine-3'- phosphorothioate
  modified_base 23: mod_base = OTHER; note = 2'-O-methyladenosine-3'-phosphate
gtactgatttagcatgttgttca

SEQ ID NO: 2944 - RNA, 21 nt, synthetic construct
  source 1..21: mol_type = other RNA
  modified_base 1: mod_base = OTHER; note = 2'-O-methylguanosine-3'- phosphorothioate
  modified_base 2: mod_base = OTHER; note = 2'-O-methyladenosine-3'- phosphorothioate
  modified_base 3: mod_base = OTHER; note = 2'-O-methyladenosine-3'-phosphate
  modified_base 4: mod_base = OTHER; note = 2'-O-methylcytidine-3'-phosphate
  modified_base 5: mod_base = OTHER; note = 2'-O-methyladenosine-3'-phosphate
  modified_base 6: mod_base = OTHER; note = 2'-O-methyladenosine-3'-phosphate
  modified_base 7: mod_base = OTHER; note = 2'-fluorocytidine-3'-phosphate
  modified_base 8: mod_base = OTHER; note = 2'-O-methyladenosine-3'-phosphate
  modified_base 9: mod_base = OTHER; note = 2'-fluorouridine-3'-phosphate
  modified_base 10: mod_base = OTHER; note = 2'-fluoroguanosine-3'-phosphate
  modified_base 11: mod_base = OTHER; note = 2'-fluorocytidine-3'-phosphate
  modified_base 12: mod_base = OTHER; note = 2'-O-methyluridine-3'-phosphate
  modified_base 13: mod_base = OTHER; note = 2'-O-methyladenosine-3'-phosphate
  modified_base 14: mod_base = OTHER; note = 2'-O-methyladenosine-3'-phosphate
  modified_base 15: mod_base = OTHER; note = 2'-O-methyladenosine-3'-phosphate
  modified_base 16: mod_base = OTHER; note = 2'-O-methyluridine-3'-phosphate
  modified_base 17: mod_base = OTHER; note = 2'-O-methylcytidine-3'-phosphate
  modified_base 18: mod_base = OTHER; note = 2'-O-methyladenosine-3'-phosphate
  modified_base 19: mod_base = OTHER; note = 2'-O-methylguanosine-3'-phosphate
  modified_base 20: mod_base = OTHER; note = 2'-O-methyluridine-3'-phosphate
  modified_base 21: mod_base = OTHER; note 2'-O-methyladenosine-3'-phosphate-N-[tris(GalNAc-alkyl)-ami dodecanoyl)]-4-hydroxyprolinol (Hyp-(GalNAc-alkyl)3)
gaacaacatgctaaatcagta

SEQ ID NO: 2945 - RNA, 23 nt, synthetic construct
  source 1..23: mol_type = other RNA
  modified_base 1: mod_base = OTHER; note = 2'-O-methyluridine-3'-phosphorothioate
  modified_base 2: mod_base = OTHER; note = 2'-fluoroadenosine-3'-phosphorothioate
  modified_base 3: mod_base = OTHER; note = 2'-O-methylcytidine-3'-phosphate
  modified_base 4: mod_base = OTHER; note = 2'-O-methyluridine-3'-phosphate
  modified_base 5: mod_base = OTHER; note = 2'-O-methylguanosine-3'-phosphate
  modified_base 6: mod_base = OTHER; note = 2'-fluoroadenosine-3'-phosphate
  modified_base 7: mod_base = OTHER; note = 2'-O-methyluridine-3'-phosphate
  modified_base 8: mod_base = OTHER; note = 2'-fluorouridine-3'-phosphate
  modified_base 9: mod_base = OTHER; note = 2'-fluorouridine-3'-phosphate
  modified_base 10: mod_base = OTHER; note = 2'-O-methyladenosine-3'-phosphate
  modified_base 11: mod_base = OTHER; note = 2'-O-methylguanosine-3'-phosphate
  modified_base 12: mod_base = OTHER; note = 2'-O-methylcytidine-3'-phosphate
  modified_base 13: mod_base = OTHER; note = 2'-O-methyladenosine-3'-phosphate
  modified_base 14: mod_base = OTHER; note = 2'-fluorouridine-3'-phosphate
  modified_base 15: mod_base = OTHER; note = 2'-O-methylguanosine-3'-phosphate
  modified_base 16: mod_base = OTHER; note = 2'-fluorouridine-3'-phosphate
  modified_base 17: mod_base = OTHER; note = 2'-O-methyluridine-3'-phosphate
  modified_base 18: mod_base = OTHER; note = 2'-O-methylguanosine-3'-phosphate
  modified_base 19: mod_base = OTHER; note = 2'-O-methyluridine-3'-phosphate
  modified_base 20: mod_base = OTHER; note = 2'-O-methyluridine-3'-phosphate
  modified_base 21: mod_base = OTHER; note = 2'-O-methylcytidine-3'- phosphorothioate
  modified_base 22: mod_base = OTHER; note = 2'-O-methyladenosine-3'- phosphorothioate
  modified_base 23: mod_base = OTHER; note = 2'-O-methyluridine-3'-phosphate
tactgatttagcatgttgttcat

SEQ ID NO: 2946 - RNA, 21 nt, synthetic construct
  source 1..21: mol_type = other RNA
  modified_base 1: mod_base = OTHER; note = 2'-O-methylguanosine-3'- phosphorothioate
  modified_base 2: mod_base = OTHER; note = 2'-O-methyladenosine-3'- phosphorothioate
  modified_base 3: mod_base = OTHER; note = 2'-O-methyladenosine-3'-phosphate
  modified_base 4: mod_base = OTHER; note = 2'-O-methyladenosine-3'-phosphate
  modified_base 5: mod_base = OTHER; note = 2'-O-methylguanosine-3'-phosphate
  modified_base 6: mod_base = OTHER; note = 2'-O-methylguanosine-3'-phosphate
  modified_base 7: mod_base = OTHER; note = 2'-fluorocytidine-3'-phosphate
  modified_base 8: mod_base = OTHER; note = 2'-O-methyladenosine-3'-phosphate
  modified_base 9: mod_base = OTHER; note = 2'-fluorocytidine-3'-phosphate
  modified_base 10: mod_base = OTHER; note = 2'-fluorouridine-3'-phosphate
  modified_base 11: mod_base = OTHER; note = 2'-fluoroguanosine-3'-phosphate
  modified_base 12: mod_base = OTHER; note = 2'-O-methyladenosine-3'-phosphate
  modified_base 13: mod_base = OTHER; note = 2'-O-methyluridine-3'-phosphate
  modified_base 14: mod_base = OTHER; note = 2'-O-methylguanosine-3'-phosphate
  modified_base 15: mod_base = OTHER; note = 2'-O-methyluridine-3'-phosphate
  modified_base 16: mod_base = OTHER; note = 2'-O-methyluridine-3'-phosphate
  modified_base 17: mod_base = OTHER; note = 2'-O-methylcytidine-3'-phosphate
  modified_base 18: mod_base = OTHER; note = 2'-O-methyluridine-3'-phosphate
  modified_base 19: mod_base = OTHER; note = 2'-O-methylguanosine-3'-phosphate
  modified_base 20: mod_base = OTHER; note = 2'-O-methyladenosine-3'-phosphate
  modified_base 21: mod_base = OTHER; note 2'-O-methyladenosine-3'-phosphate-N-[tris(GalNAc-alkyl)-ami dodecanoyl)]-4-hydroxyprolinol (Hyp-(GalNAc-alkyl)3)
gaaaggcactgatgttctgaa

SEQ ID NO: 2947 - RNA, 23 nt, synthetic construct
  source 1..23: mol_type = other RNA
  modified_base 1: mod_base = OTHER; note = 2'-O-methyluridine-3'-phosphorothioate
  modified_base 2: mod_base = OTHER; note = 2'-fluorouridine -3'-phosphorothioate
  modified_base 3: mod_base = OTHER; note = 2'-O-methylcytidine-3'-phosphate
  modified_base 4: mod_base = OTHER; note = 2'-O-methyladenosine-3'-phosphate
  modified_base 5: mod_base = OTHER; note = 2'-O-methylguanosine-3'-phosphate
  modified_base 6: mod_base = OTHER; note = 2'-fluoroadenosine-3'-phosphate
  modified_base 7: mod_base = OTHER; note = 2'-O-methyladenosine-3'-phosphate
  modified_base 8: mod_base = OTHER; note = 2'-fluorocytidine-3'-phosphate
  modified_base 9: mod_base = OTHER; note = 2'-fluoroadenosine-3'-phosphate
  modified_base 10: mod_base = OTHER; note = 2'-O-methyluridine-3'-phosphate
  modified_base 11: mod_base = OTHER; note = 2'-O-methylcytidine-3'-phosphate
  modified_base 12: mod_base = OTHER; note = 2'-O-methyladenosine-3'-phosphate
  modified_base 13: mod_base = OTHER; note = 2'-O-methylguanosine-3'-phosphate
  modified_base 14: mod_base = OTHER; note = 2'-fluorouridine-3'-phosphate
  modified_base 15: mod_base = OTHER; note = 2'-O-methylguanosine-3'-phosphate
  modified_base 16: mod_base = OTHER; note = 2'-fluorocytidine-3'-phosphate
  modified_base 17: mod_base = OTHER; note = 2'-O-methylcytidine-3'-phosphate
  modified_base 18: mod_base = OTHER; note = 2'-O-methyluridine-3'-phosphate
  modified_base 19: mod_base = OTHER; note = 2'-O-methyluridine-3'-phosphate
  modified_base 20: mod_base = OTHER; note = 2'-O-methyluridine-3'-phosphate
  modified_base 21: mod_base = OTHER; note = 2'-O-methylcytidine-3'- phosphorothioate
  modified_base 22: mod_base = OTHER; note = 2'-O-methylcytidine-3'- phosphorothioate
  modified_base 23: mod_base = OTHER; note = 2'-O-methylguanosine-3'-phosphate
ttcagaacatcagtgcctttccg

SEQ ID NO: 2948 - RNA, 21 nt, synthetic construct
  source 1..21: mol_type = other RNA
  modified_base 1: mod_base = OTHER; note = 2'-O-methyladenosine-3'- phosphorothioate
  modified_base 2: mod_base = OTHER; note = 2'-O-methyladenosine-3'- phosphorothioate
  modified_base 3: mod_base = OTHER; note = 2'-O-methyladenosine-3'-phosphate
  modified_base 4: mod_base = OTHER; note = 2'-O-methylguanosine-3'-phosphate
  modified_base 5: mod_base = OTHER; note = 2'-O-methylguanosine-3'-phosphate
  modified_base 6: mod_base = OTHER; note = 2'-O-methylcytidine-3'-phosphate
  modified_base 7: mod_base = OTHER; note = 2'-fluoroadenosine-3'-phosphate
  modified_base 8: mod_base = OTHER; note = 2'-O-methylcytidine-3'-phosphate
  modified_base 9: mod_base = OTHER; note = 2'-fluorouridine-3'-phosphate
  modified_base 10: mod_base = OTHER; note = 2'-fluoroguanosine-3'-phosphate
  modified_base 11: mod_base = OTHER; note = 2'-fluoroadenosine-3'-phosphate
  modified_base 12: mod_base = OTHER; note = 2'-O-methyluridine-3'-phosphate
  modified_base 13: mod_base = OTHER; note = 2'-O-methylguanosine-3'-phosphate
  modified_base 14: mod_base = OTHER; note = 2'-O-methyluridine-3'-phosphate
  modified_base 15: mod_base = OTHER; note = 2'-O-methyluridine-3'-phosphate
  modified_base 16: mod_base = OTHER; note = 2'-O-methylcytidine-3'-phosphate
  modified_base 17: mod_base = OTHER; note = 2'-O-methyluridine-3'-phosphate
  modified_base 18: mod_base = OTHER; note = 2'-O-methylguanosine-3'-phosphate
  modified_base 19: mod_base = OTHER; note = 2'-O-methyladenosine-3'-phosphate
  modified_base 20: mod_base = OTHER; note = 2'-O-methyladenosine-3'-phosphate
  modified_base 21: mod_base = OTHER; note 2'-O-methyladenosine-3'-phosphate-N-[tris(GalNAc-alkyl)-ami dodecanoyl)]-4-hydroxyprolinol (Hyp-(GalNAc-alkyl)3)
aaaggcactgatgttctgaaa

SEQ ID NO: 2949 - RNA, 23 nt, synthetic construct
  source 1..23: mol_type = other RNA
  modified_base 1: mod_base = OTHER; note = 2'-O-methyluridine-3'-phosphorothioate
  modified_base 2: mod_base = OTHER; note = 2'-fluorouridine -3'-phosphorothioate
  modified_base 3: mod_base = OTHER; note = 2'-O-methyluridine-3'-phosphate
  modified_base 4: mod_base = OTHER; note = 2'-O-methylcytidine-3'-phosphate
  modified_base 5: mod_base = OTHER; note = 2'-O-methyladenosine-3'-phosphate
  modified_base 6: mod_base = OTHER; note = 2'-fluoroguanosine-3'-phosphate
  modified_base 7: mod_base = OTHER; note = 2'-O-methyladenosine-3'-phosphate
  modified_base 8: mod_base = OTHER; note = 2'-fluoroadenosine-3'-phosphate
  modified_base 9: mod_base = OTHER; note = 2'-fluorocytidine-3'-phosphate
  modified_base 10: mod_base = OTHER; note = 2'-O-methyladenosine-3'-phosphate
  modified_base 11: mod_base = OTHER; note = 2'-O-methyluridine-3'-phosphate
  modified_base 12: mod_base = OTHER; note = 2'-O-methylcytidine-3'-phosphate
  modified_base 13: mod_base = OTHER; note = 2'-O-methyladenosine-3'-phosphate
  modified_base 14: mod_base = OTHER; note = 2'-fluoroguanosine-3'-phosphate
  modified_base 15: mod_base = OTHER; note = 2'-O-methyluridine-3'-phosphate
  modified_base 16: mod_base = OTHER; note = 2'-fluoroguanosine-3'-phosphate
  modified_base 17: mod_base = OTHER; note = 2'-O-methylcytidine-3'-phosphate
  modified_base 18: mod_base = OTHER; note = 2'-O-methylcytidine-3'-phosphate
  modified_base 19: mod_base = OTHER; note = 2'-O-methyluridine-3'-phosphate
  modified_base 20: mod_base = OTHER; note = 2'-O-methyluridine-3'-phosphate
  modified_base 21: mod_base = OTHER; note = 2'-O-methyluridine-3'-phosphorothioate
  modified_base 22: mod_base = OTHER; note = 2'-O-methylcytidine-3'- phosphorothioate
  modified_base 23: mod_base = OTHER; note = 2'-O-methylcytidine-3'-phosphate
tttcagaacatcagtgcctttcc

SEQ ID NO: 2950 - RNA, 21 nt, synthetic construct
  source 1..21: mol_type = other RNA
  modified_base 1: mod_base = OTHER; note = 2'-O-methyluridine-3'-phosphorothioate
  modified_base 2: mod_base = OTHER; note = 2'-O-methylguanosine-3'- phosphorothioate
  modified_base 3: mod_base = OTHER; note = 2'-O-methylcytidine-3'-phosphate
  modified_base 4: mod_base = OTHER; note = 2'-O-methylguanosine-3'-phosphate
  modified_base 5: mod_base = OTHER; note = 2'-O-methylguanosine-3'-phosphate
  modified_base 6: mod_base = OTHER; note = 2'-O-methyladenosine-3'-phosphate
  modified_base 7: mod_base = OTHER; note = 2'-fluoroadenosine-3'-phosphate
  modified_base 8: mod_base = OTHER; note = 2'-O-methyladenosine-3'-phosphate
  modified_base 9: mod_base = OTHER; note = 2'-fluoroguanosine-3'-phosphate
  modified_base 10: mod_base = OTHER; note = 2'-fluoroguanosine-3'-phosphate
  modified_base 11: mod_base = OTHER; note = 2'-fluorocytidine-3'-phosphate
  modified_base 12: mod_base = OTHER; note = 2'-O-methyladenosine-3'-phosphate
  modified_base 13: mod_base = OTHER; note = 2'-O-methylcytidine-3'-phosphate
  modified_base 14: mod_base = OTHER; note = 2'-O-methyluridine-3'-phosphate
  modified_base 15: mod_base = OTHER; note = 2'-O-methylguanosine-3'-phosphate
  modified_base 16: mod_base = OTHER; note = 2'-O-methyladenosine-3'-phosphate
  modified_base 17: mod_base = OTHER; note = 2'-O-methyluridine-3'-phosphate
  modified_base 18: mod_base = OTHER; note = 2'-O-methylguanosine-3'-phosphate
  modified_base 19: mod_base = OTHER; note = 2'-O-methyluridine-3'-phosphate
  modified_base 20: mod_base = OTHER; note = 2'-O-methyluridine-3'-phosphate
  modified_base 21: mod_base = OTHER; note 2'-O-methylcytidine-3'-phosphate-N-[tris(GalNAc-alkyl)-amid odecanoyl)]-4-hydroxyprolinol (Hyp-(GalNAc-alkyl)3)
tgcggaaaggcactgatgttc

SEQ ID NO: 2951 - RNA, 23 nt, synthetic construct
  source 1..23: mol_type = other RNA
  modified_base 1: mod_base = OTHER; note = 2'-O-methylguanosine-3'- phosphorothioate
  modified_base 2: mod_base = OTHER; note = 2'-fluoroadenosine-3'-phosphorothioate
  modified_base 3: mod_base = OTHER; note = 2'-O-methyladenosine-3'-phosphate
  modified_base 4: mod_base = OTHER; note = 2'-O-methylcytidine-3'-phosphate
  modified_base 5: mod_base = OTHER; note = 2'-O-methyladenosine-3'-phosphate
  modified_base 6: mod_base = OTHER; note = 2'-fluorouridine-3'-phosphate
  modified_base 7: mod_base = OTHER; note = 2'-O-methylcytidine-3'-phosphate
  modified_base 8: mod_base = OTHER; note = 2'-fluoroadenosine-3'-phosphate
  modified_base 9: mod_base = OTHER; note = 2'-fluoroguanosine-3'-phosphate
  modified_base 10: mod_base = OTHER; note = 2'-O-methyluridine-3'-phosphate
  modified_base 11: mod_base = OTHER; note = 2'-O-methylguanosine-3'-phosphate
  modified_base 12: mod_base = OTHER; note = 2'-O-methylcytidine-3'-phosphate
  modified_base 13: mod_base = OTHER; note = 2'-O-methylcytidine-3'-phosphate
  modified_base 14: mod_base = OTHER; note = 2'-fluorouridine-3'-phosphate
  modified_base 15: mod_base = OTHER; note = 2'-O-methyluridine-3'-phosphate
  modified_base 16: mod_base = OTHER; note = 2'-fluorouridine-3'-phosphate
  modified_base 17: mod_base = OTHER; note = 2'-O-methylcytidine-3'-phosphate
  modified_base 18: mod_base = OTHER; note = 2'-O-methylcytidine-3'-phosphate
  modified_base 19: mod_base = OTHER; note = 2'-O-methylguanosine-3'-phosphate
  modified_base 20: mod_base = OTHER; note = 2'-O-methylcytidine-3'-phosphate
  modified_base 21: mod_base = OTHER; note = 2'-O-methyladenosine-3'- phosphorothioate
  modified_base 22: mod_base = OTHER; note = 2'-O-methylcytidine-3'- phosphorothioate
  modified_base 23: mod_base = OTHER; note = 2'-O-methyladenosine-3'-phosphate
gaacatcagtgcctttccgcaca

SEQ ID NO: 2952 - RNA, 21 nt, synthetic construct
  source 1..21: mol_type = other RNA
  modified_base 1: mod_base = OTHER; note = 2'-O-methylguanosine-3'- phosphorothioate
  modified_base 2: mod_base = OTHER; note = 2'-O-methyluridine-3'-phosphorothioate
  modified_base 3: mod_base = OTHER; note = 2'-O-methylguanosine-3'-phosphate
  modified_base 4: mod_base = OTHER; note = 2'-O-methylcytidine-3'-phosphate
  modified_base 5: mod_base = OTHER; note = 2'-O-methylguanosine-3'-phosphate
  modified_base 6: mod_base = OTHER; note = 2'-O-methylguanosine-3'-phosphate
  modified_base 7: mod_base = OTHER; note = 2'-fluoroadenosine-3'-phosphate
  modified_base 8: mod_base = OTHER; note = 2'-O-methyladenosine-3'-phosphate
  modified_base 9: mod_base = OTHER; note = 2'-fluoroadenosine-3'-phosphate
  modified_base 10: mod_base = OTHER; note = 2'-fluoroguanosine-3'-phosphate
  modified_base 11: mod_base = OTHER; note = 2'-fluoroguanosine-3'-phosphate
  modified_base 12: mod_base = OTHER; note = 2'-O-methylcytidine-3'-phosphate
  modified_base 13: mod_base = OTHER; note = 2'-O-methyladenosine-3'-phosphate
  modified_base 14: mod_base = OTHER; note = 2'-O-methylcytidine-3'-phosphate
  modified_base 15: mod_base = OTHER; note = 2'-O-methyluridine-3'-phosphate
  modified_base 16: mod_base = OTHER; note = 2'-O-methylguanosine-3'-phosphate
  modified_base 17: mod_base = OTHER; note = 2'-O-methyladenosine-3'-phosphate
  modified_base 18: mod_base = OTHER; note = 2'-O-methyluridine-3'-phosphate
  modified_base 19: mod_base = OTHER; note = 2'-O-methylguanosine-3'-phosphate
  modified_base 20: mod_base = OTHER; note = 2'-O-methyluridine-3'-phosphate
  modified_base 21: mod_base = OTHER; note 2'-O-methyluridine-3'-phosphate-N-[tris(GalNAc-alkyl)-amido decanoyl)]-4-hydroxyprolinol (Hyp-(GalNAc-alkyl)3)
gtgcggaaaggcactgatgtt

SEQ ID NO: 2953 - RNA, 23 nt, synthetic construct
  source 1..23: mol_type = other RNA
  modified_base 1: mod_base = OTHER; note = 2'-O-methyladenosine-3'- phosphorothioate
  modified_base 2: mod_base = OTHER; note = 2'-fluoroadenosine-3'-phosphorothioate
  modified_base 3: mod_base = OTHER; note = 2'-O-methylcytidine-3'-phosphate
  modified_base 4: mod_base = OTHER; note = 2'-O-methyladenosine-3'-phosphate
  modified_base 5: mod_base = OTHER; note = 2'-O-methyluridine-3'-phosphate
  modified_base 6: mod_base = OTHER; note = 2'-fluorocytidine-3'-phosphate
  modified_base 7: mod_base = OTHER; note = 2'-O-methyladenosine-3'-phosphate
  modified_base 8: mod_base = OTHER; note = 2'-fluoroguanosine-3'-phosphate
  modified_base 9: mod_base = OTHER; note = 2'-fluorouridine-3'-phosphate
  modified_base 10: mod_base = OTHER; note = 2'-O-methylguanosine-3'-phosphate
  modified_base 11: mod_base = OTHER; note = 2'-O-methylcytidine-3'-phosphate
  modified_base 12: mod_base = OTHER; note = 2'-O-methylcytidine-3'-phosphate
  modified_base 13: mod_base = OTHER; note = 2'-O-methyluridine-3'-phosphate
  modified_base 14: mod_base = OTHER; note = 2'-fluorouridine-3'-phosphate
  modified_base 15: mod_base = OTHER; note = 2'-O-methyluridine-3'-phosphate
  modified_base 16: mod_base = OTHER; note = 2'-fluorocytidine-3'-phosphate
  modified_base 17: mod_base = OTHER; note = 2'-O-methylcytidine-3'-phosphate
  modified_base 18: mod_base = OTHER; note = 2'-O-methylguanosine-3'-phosphate
  modified_base 19: mod_base = OTHER; note = 2'-O-methylcytidine-3'-phosphate
  modified_base 20: mod_base = OTHER; note = 2'-O-methyladenosine-3'-phosphate
  modified_base 21: mod_base = OTHER; note = 2'-O-methylcytidine-3'- phosphorothioate
  modified_base 22: mod_base = OTHER; note = 2'-O-methyladenosine-3'- phosphorothioate
  modified_base 23: mod_base = OTHER; note = 2'-O-methylcytidine-3'-phosphate
aacatcagtgcctttccgcacac

SEQ ID NO: 2954 - RNA, 21 nt, synthetic construct
  source 1..21: mol_type = other RNA
  modified_base 1: mod_base = OTHER; note = 2'-O-methylguanosine-3'- phosphorothioate
  modified_base 2: mod_base = OTHER; note = 2'-O-methyluridine-3'-phosphorothioate
  modified_base 3: mod_base = OTHER; note = 2'-O-methylcytidine-3'-phosphate
  modified_base 4: mod_base = OTHER; note = 2'-O-methyladenosine-3'-phosphate
  modified_base 5: mod_base = OTHER; note = 2'-O-methylguanosine-3'-phosphate
  modified_base 6: mod_base = OTHER; note = 2'-O-methylcytidine-3'-phosphate
  modified_base 7: mod_base = OTHER; note = 2'-fluoroadenosine-3'-phosphate
  modified_base 8: mod_base = OTHER; note = 2'-O-methyluridine-3'-phosphate
  modified_base 9: mod_base = OTHER; note = 2'-fluoroguanosine-3'-phosphate
  modified_base 10: mod_base = OTHER; note = 2'-fluorocytidine-3'-phosphate
  modified_base 11: mod_base = OTHER; note = 2'-fluorocytidine-3'-phosphate
  modified_base 12: mod_base = OTHER; note = 2'-O-methyladenosine-3'-phosphate
  modified_base 13: mod_base = OTHER; note = 2'-O-methyladenosine-3'-phosphate
  modified_base 14: mod_base = OTHER; note = 2'-O-methyluridine-3'-phosphate
  modified_base 15: mod_base = OTHER; note = 2'-O-methyladenosine-3'-phosphate
  modified_base 16: mod_base = OTHER; note = 2'-O-methyluridine-3'-phosphate
  modified_base 17: mod_base = OTHER; note = 2'-O-methylguanosine-3'-phosphate
  modified_base 18: mod_base = OTHER; note = 2'-O-methyluridine-3'-phosphate
  modified_base 19: mod_base = OTHER; note = 2'-O-methylguanosine-3'-phosphate
  modified_base 20: mod_base = OTHER; note = 2'-O-methyluridine-3'-phosphate
  modified_base 21: mod_base = OTHER; note 2'-O-methylguanosine-3'-phosphate-N-[tris(GalNAc-alkyl)-ami dodecanoyl)]-4-hydroxyprolinol (Hyp-(GalNAc-alkyl)3)
gtcagcatgccaatatgtgtg

SEQ ID NO: 2955 - RNA, 23 nt, synthetic construct
  source 1..23: mol_type = other RNA
  modified_base 1: mod_base = OTHER; note = 2'-O-methylcytidine-3'- phosphorothioate
  modified_base 2: mod_base = OTHER; note = 2'-fluoroadenosine-3'-phosphorothioate
  modified_base 3: mod_base = OTHER; note = 2'-O-methylcytidine-3'-phosphate
  modified_base 4: mod_base = OTHER; note = 2'-O-methyladenosine-3'-phosphate
  modified_base 5: mod_base = OTHER; note = 2'-O-methylcytidine-3'-phosphate
  modified_base 6: mod_base = OTHER; note = 2'-fluoroadenosine-3'-phosphate
  modified_base 7: mod_base = OTHER; note = 2'-O-methyluridine-3'-phosphate
  modified_base 8: mod_base = OTHER; note = 2'-fluoroadenosine-3'-phosphate
  modified_base 9: mod_base = OTHER; note = 2'-fluorouridine-3'-phosphate
  modified_base 10: mod_base = OTHER; note = 2'-O-methyluridine-3'-phosphate
  modified_base 11: mod_base = OTHER; note = 2'-O-methylguanosine-3'-phosphate
  modified_base 12: mod_base = OTHER; note = 2'-O-methylguanosine-3'-phosphate
  modified_base 13: mod_base = OTHER; note = 2'-O-methylcytidine-3'-phosphate
  modified_base 14: mod_base = OTHER; note = 2'-fluoroadenosine-3'-phosphate
  modified_base 15: mod_base = OTHER; note = 2'-O-methyluridine-3'-phosphate
  modified_base 16: mod_base = OTHER; note = 2'-fluoroguanosine-3'-phosphate
  modified_base 17: mod_base = OTHER; note = 2'-O-methylcytidine-3'-phosphate
  modified_base 18: mod_base = OTHER; note = 2'-O-methyluridine-3'-phosphate
  modified_base 19: mod_base = OTHER; note = 2'-O-methylguanosine-3'-phosphate
  modified_base 20: mod_base = OTHER; note = 2'-O-methyladenosine-3'-phosphate
  modified_base 21: mod_base = OTHER; note = 2'-O-methylcytidine-3'- phosphorothioate
  modified_base 22: mod_base = OTHER; note = 2'-O-methylcytidine-3'- phosphorothioate
  modified_base 23: mod_base = OTHER; note = 2'-O-methylcytidine-3'-phosphate
cacacatattggcatgctgaccc

SEQ ID NO: 2956 - RNA, 21 nt, synthetic construct
  source 1..21: mol_type = other RNA
  modified_base 1: mod_base = OTHER; note = 2'-O-methyluridine-3'-phosphorothioate
  modified_base 2: mod_base = OTHER; note = 2'-O-methylcytidine-3'- phosphorothioate
  modified_base 3: mod_base = OTHER; note = 2'-O-methyladenosine-3'-phosphate
  modified_base 4: mod_base = OTHER; note = 2'-O-methylguanosine-3'-phosphate
  modified_base 5: mod_base = OTHER; note = 2'-O-methylcytidine-3'-phosphate
  modified_base 6: mod_base = OTHER; note = 2'-O-methyladenosine-3'-phosphate
  modified_base 7: mod_base = OTHER; note = 2'-fluorouridine-3'-phosphate
  modified_base 8: mod_base = OTHER; note = 2'-O-methylguanosine-3'-phosphate
  modified_base 9: mod_base = OTHER; note = 2'-fluorocytidine-3'-phosphate
  modified_base 10: mod_base = OTHER; note = 2'-fluorocytidine-3'-phosphate
  modified_base 11: mod_base = OTHER; note = 2'-fluoroadenosine-3'-phosphate
  modified_base 12: mod_base = OTHER; note = 2'-O-methyladenosine-3'-phosphate
  modified_base 13: mod_base = OTHER; note = 2'-O-methyluridine-3'-phosphate
  modified_base 14: mod_base = OTHER; note = 2'-O-methyladenosine-3'-phosphate
  modified_base 15: mod_base = OTHER; note = 2'-O-methyluridine-3'-phosphate
  modified_base 16: mod_base = OTHER; note = 2'-O-methylguanosine-3'-phosphate
  modified_base 17: mod_base = OTHER; note = 2'-O-methyluridine-3'-phosphate
  modified_base 18: mod_base = OTHER; note = 2'-O-methylguanosine-3'-phosphate
  modified_base 19: mod_base = OTHER; note = 2'-O-methyluridine-3'-phosphate
  modified_base 20: mod_base = OTHER; note = 2'-O-methylguanosine-3'-phosphate
  modified_base 21: mod_base = OTHER; note 2'-O-methylguanosine-3'-phosphate-N-[tris(GalNAc-alkyl)-ami dodecanoyl)]-4-hydroxyprolinol (Hyp-(GalNAc-alkyl)3)
tcagcatgccaatatgtgtgg

SEQ ID NO: 2957 - RNA, 23 nt, synthetic construct
  source 1..23: mol_type = other RNA
  modified_base 1: mod_base = OTHER; note = 2'-O-methylcytidine-3'- phosphorothioate
  modified_base 2: mod_base = OTHER; note = 2'-fluorocytidine-3'-phosphorothioate
  modified_base 3: mod_base = OTHER; note = 2'-O-methyladenosine-3'-phosphate
  modified_base 4: mod_base = OTHER; note = 2'-O-methylcytidine-3'-phosphate
  modified_base 5: mod_base = OTHER; note = 2'-O-methyladenosine-3'-phosphate
  modified_base 6: mod_base = OTHER; note = 2'-fluorocytidine-3'-phosphate
  modified_base 7: mod_base = OTHER; note = 2'-O-methyladenosine-3'-phosphate
  modified_base 8: mod_base = OTHER; note = 2'-fluorouridine-3'-phosphate
  modified_base 9: mod_base = OTHER; note = 2'-fluoroadenosine-3'-phosphate
  modified_base 10: mod_base = OTHER; note = 2'-O-methyluridine-3'-phosphate
  modified_base 11: mod_base = OTHER; note = 2'-O-methyluridine-3'-phosphate
  modified_base 12: mod_base = OTHER; note = 2'-O-methylguanosine-3'-phosphate
  modified_base 13: mod_base = OTHER; note = 2'-O-methylguanosine-3'-phosphate
  modified_base 14: mod_base = OTHER; note = 2'-fluorocytidine-3'-phosphate
  modified_base 15: mod_base = OTHER; note = 2'-O-methyladenosine-3'-phosphate
  modified_base 16: mod_base = OTHER; note = 2'-fluorouridine-3'-phosphate
  modified_base 17: mod_base = OTHER; note = 2'-O-methylguanosine-3'-phosphate
  modified_base 18: mod_base = OTHER; note = 2'-O-methylcytidine-3'-phosphate
  modified_base 19: mod_base = OTHER; note = 2'-O-methyluridine-3'-phosphate
  modified_base 20: mod_base = OTHER; note = 2'-O-methylguanosine-3'-phosphate
  modified_base 21: mod_base = OTHER; note = 2'-O-methyladenosine-3'- phosphorothioate
  modified_base 22: mod_base = OTHER; note = 2'-O-methylcytidine-3'- phosphorothioate
  modified_base 23: mod_base = OTHER; note = 2'-O-methylcytidine-3'-phosphate
ccacacatattggcatgctgacc

SEQ ID NO: 2958 - RNA, 21 nt, synthetic construct
  source 1..21: mol_type = other RNA
  modified_base 1: mod_base = OTHER; note = 2'-O-methylguanosine-3'- phosphorothioate
  modified_base 2: mod_base = OTHER; note = 2'-O-methyladenosine-3'- phosphorothioate
  modified_base 3: mod_base = OTHER; note = 2'-O-methylguanosine-3'-phosphate
  modified_base 4: mod_base = OTHER; note = 2'-O-methylguanosine-3'-phosphate
  modified_base 5: mod_base = OTHER; note = 2'-O-methylguanosine-3'-phosphate
  modified_base 6: mod_base = OTHER; note = 2'-O-methyluridine-3'-phosphate
  modified_base 7: mod_base = OTHER; note = 2'-fluorocytidine-3'-phosphate
  modified_base 8: mod_base = OTHER; note = 2'-O-methyladenosine-3'-phosphate
  modified_base 9: mod_base = OTHER; note = 2'-fluoroguanosine-3'-phosphate
  modified_base 10: mod_base = OTHER; note = 2'-fluorocytidine-3'-phosphate
  modified_base 11: mod_base = OTHER; note = 2'-fluoroadenosine-3'-phosphate
  modified_base 12: mod_base = OTHER; note = 2'-O-methyluridine-3'-phosphate
  modified_base 13: mod_base = OTHER; note = 2'-O-methylguanosine-3'-phosphate
  modified_base 14: mod_base = OTHER; note = 2'-O-methylcytidine-3'-phosphate
  modified_base 15: mod_base = OTHER; note = 2'-O-methylcytidine-3'-phosphate
  modified_base 16: mod_base = OTHER; note = 2'-O-methyladenosine-3'-phosphate
  modified_base 17: mod_base = OTHER; note = 2'-O-methyladenosine-3'-phosphate
  modified_base 18: mod_base = OTHER; note = 2'-O-methyluridine-3'-phosphate
  modified_base 19: mod_base = OTHER; note = 2'-O-methyladenosine-3'-phosphate
  modified_base 20: mod_base = OTHER; note = 2'-O-methyluridine-3'-phosphate
  modified_base 21: mod_base = OTHER; note 2'-O-methylguanosine-3'-phosphate-N-[tris(GalNAc-alkyl)-ami dodecanoyl)]-4-hydroxyprolinol (Hyp-(GalNAc-alkyl)3)
gagggtcagcatgccaatatg

SEQ ID NO: 2959 - RNA, 23 nt, synthetic construct
  source 1..23: mol_type = other RNA
  modified_base 1: mod_base = OTHER; note = 2'-O-methylcytidine-3'- phosphorothioate
  modified_base 2: mod_base = OTHER; note = 2'-fluoroadenosine-3'-phosphorothioate
  modified_base 3: mod_base = OTHER; note = 2'-O-methyluridine-3'-phosphate
  modified_base 4: mod_base = OTHER; note = 2'-O-methyladenosine-3'-phosphate
  modified_base 5: mod_base = OTHER; note = 2'-O-methyluridine-3'-phosphate
  modified_base 6: mod_base = OTHER; note = 2'-fluorouridine-3'-phosphate
  modified_base 7: mod_base = OTHER; note = 2'-O-methylguanosine-3'-phosphate
  modified_base 8: mod_base = OTHER; note = 2'-fluoroguanosine-3'-phosphate
  modified_base 9: mod_base = OTHER; note = 2'-fluorocytidine-3'-phosphate
  modified_base 10: mod_base = OTHER; note = 2'-O-methyladenosine-3'-phosphate
  modified_base 11: mod_base = OTHER; note = 2'-O-methyluridine-3'-phosphate
  modified_base 12: mod_base = OTHER; note = 2'-O-methylguanosine-3'-phosphate
  modified_base 13: mod_base = OTHER; note = 2'-O-methylcytidine-3'-phosphate
  modified_base 14: mod_base = OTHER; note = 2'-fluorouridine-3'-phosphate
  modified_base 15: mod_base = OTHER; note = 2'-O-methylguanosine-3'-phosphate
  modified_base 16: mod_base = OTHER; note = 2'-fluoroadenosine-3'-phosphate
  modified_base 17: mod_base = OTHER; note = 2'-O-methylcytidine-3'-phosphate
  modified_base 18: mod_base = OTHER; note = 2'-O-methylcytidine-3'-phosphate
  modified_base 19: mod_base = OTHER; note = 2'-O-methylcytidine-3'-phosphate
  modified_base 20: mod_base = OTHER; note = 2'-O-methyluridine-3'-phosphate
  modified_base 21: mod_base = OTHER; note = 2'-O-methylcytidine-3'- phosphorothioate
  modified_base 22: mod_base = OTHER; note = 2'-O-methyluridine-3'-phosphorothioate
  modified_base 23: mod_base = OTHER; note = 2'-O-methylguanosine-3'-phosphate
catattggcatgctgaccctctg

SEQ ID NO: 2960 - RNA, 21 nt, synthetic construct
  source 1..21: mol_type = other RNA
  modified_base 1: mod_base = OTHER; note = 2'-O-methyladenosine-3'- phosphorothioate
  modified_base 2: mod_base = OTHER; note = 2'-O-methylguanosine-3'- phosphorothioate
  modified_base 3: mod_base = OTHER; note = 2'-O-methyladenosine-3'-phosphate
  modified_base 4: mod_base = OTHER; note = 2'-O-methylguanosine-3'-phosphate
  modified_base 5: mod_base = OTHER; note = 2'-O-methylguanosine-3'-phosphate
  modified_base 6: mod_base = OTHER; note = 2'-O-methylguanosine-3'-phosphate
  modified_base 7: mod_base = OTHER; note = 2'-fluorouridine-3'-phosphate
  modified_base 8: mod_base = OTHER; note = 2'-O-methylcytidine-3'-phosphate
  modified_base 9: mod_base = OTHER; note = 2'-fluoroadenosine-3'-phosphate
  modified_base 10: mod_base = OTHER; note = 2'-fluoroguanosine-3'-phosphate
  modified_base 11: mod_base = OTHER; note = 2'-fluorocytidine-3'-phosphate
  modified_base 12: mod_base = OTHER; note = 2'-O-methyladenosine-3'-phosphate
  modified_base 13: mod_base = OTHER; note = 2'-O-methyluridine-3'-phosphate
  modified_base 14: mod_base = OTHER; note = 2'-O-methylguanosine-3'-phosphate
  modified_base 15: mod_base = OTHER; note = 2'-O-methylcytidine-3'-phosphate
  modified_base 16: mod_base = OTHER; note = 2'-O-methylcytidine-3'-phosphate
  modified_base 17: mod_base = OTHER; note = 2'-O-methyladenosine-3'-phosphate
  modified_base 18: mod_base = OTHER; note = 2'-O-methyladenosine-3'-phosphate
  modified_base 19: mod_base = OTHER; note = 2'-O-methyluridine-3'-phosphate
  modified_base 20: mod_base = OTHER; note = 2'-O-methyladenosine-3'-phosphate
  modified_base 21: mod_base = OTHER; note 2'-O-methyluridine-3'-phosphate-N-[tris(GalNAc-alkyl)-amido decanoyl)]-4-hydroxyprolinol (Hyp-(GalNAc-alkyl)3)
agagggtcagcatgccaatat

SEQ ID NO: 2961 - RNA, 23 nt, synthetic construct
  source 1..23: mol_type = other RNA
  modified_base 1: mod_base = OTHER; note = 2'-O-methyladenosine-3'- phosphorothioate
  modified_base 2: mod_base = OTHER; note = 2'-fluorouridine -3'-phosphorothioate
  modified_base 3: mod_base = OTHER; note = 2'-O-methyladenosine-3'-phosphate
  modified_base 4: mod_base = OTHER; note = 2'-O-methyluridine-3'-phosphate
  modified_base 5: mod_base = OTHER; note = 2'-O-methyluridine-3'-phosphate
  modified_base 6: mod_base = OTHER; note = 2'-fluoroguanosine-3'-phosphate
  modified_base 7: mod_base = OTHER; note = 2'-O-methylguanosine-3'-phosphate
  modified_base 8: mod_base = OTHER; note = 2'-fluorocytidine-3'-phosphate
  modified_base 9: mod_base = OTHER; note = 2'-fluoroadenosine-3'-phosphate
  modified_base 10: mod_base = OTHER; note = 2'-O-methyluridine-3'-phosphate
  modified_base 11: mod_base = OTHER; note = 2'-O-methylguanosine-3'-phosphate
  modified_base 12: mod_base = OTHER; note = 2'-O-methylcytidine-3'-phosphate
  modified_base 13: mod_base = OTHER; note = 2'-O-methyluridine-3'-phosphate
  modified_base 14: mod_base = OTHER; note = 2'-fluoroguanosine-3'-phosphate
  modified_base 15: mod_base = OTHER; note = 2'-O-methyladenosine-3'-phosphate
  modified_base 16: mod_base = OTHER; note = 2'-fluorocytidine-3'-phosphate
  modified_base 17: mod_base = OTHER; note = 2'-O-methylcytidine-3'-phosphate
  modified_base 18: mod_base = OTHER; note = 2'-O-methylcytidine-3'-phosphate
  modified_base 19: mod_base = OTHER; note = 2'-O-methyluridine-3'-phosphate
  modified_base 20: mod_base = OTHER; note = 2'-O-methylcytidine-3'-phosphate
  modified_base 21: mod_base = OTHER; note = 2'-O-methyluridine-3'-phosphorothioate
  modified_base 22: mod_base = OTHER; note = 2'-O-methylguanosine-3'- phosphorothioate
  modified_base 23: mod_base = OTHER; note = 2'-O-methyluridine-3'-phosphate
atattggcatgctgaccctctgt

SEQ ID NO: 2962 - RNA, 21 nt, synthetic construct
  source 1..21: mol_type = other RNA
  modified_base 1: mod_base = OTHER; note = 2'-O-methylguanosine-3'- phosphorothioate
  modified_base 2: mod_base = OTHER; note = 2'-O-methyladenosine-3'- phosphorothioate
  modified_base 3: mod_base = OTHER; note = 2'-O-methyluridine-3'-phosphate
  modified_base 4: mod_base = OTHER; note = 2'-O-methylguanosine-3'-phosphate
  modified_base 5: mod_base = OTHER; note = 2'-O-methylcytidine-3'-phosphate
  modified_base 6: mod_base = OTHER; note = 2'-O-methyluridine-3'-phosphate
  modified_base 7: mod_base = OTHER; note = 2'-fluorocytidine-3'-phosphate
  modified_base 8: mod_base = OTHER; note = 2'-O-methylcytidine-3'-phosphate
  modified_base 9: mod_base = OTHER; note = 2'-fluoroguanosine-3'-phosphate
  modified_base 10: mod_base = OTHER; note = 2'-fluoroguanosine-3'-phosphate
  modified_base 11: mod_base = OTHER; note = 2'-fluoroadenosine-3'-phosphate
  modified_base 12: mod_base = OTHER; note = 2'-O-methyladenosine-3'-phosphate
  modified_base 13: mod_base = OTHER; note = 2'-O-methyluridine-3'-phosphate
  modified_base 14: mod_base = OTHER; note = 2'-O-methylguanosine-3'-phosphate
  modified_base 15: mod_base = OTHER; note = 2'-O-methyluridine-3'-phosphate
  modified_base 16: mod_base = OTHER; note = 2'-O-methyluridine-3'-phosphate
  modified_base 17: mod_base = OTHER; note = 2'-O-methylguanosine-3'-phosphate
  modified_base 18: mod_base = OTHER; note = 2'-O-methylcytidine-3'-phosphate
  modified_base 19: mod_base = OTHER; note = 2'-O-methyluridine-3'-phosphate
  modified_base 20: mod_base = OTHER; note = 2'-O-methylguanosine-3'-phosphate
  modified_base 21: mod_base = OTHER; note 2'-O-methyladenosine-3'-phosphate-N-[tris(GalNAc-alkyl)-ami dodecanoyl)]-4-hydroxyprolinol (Hyp-(GalNAc-alkyl)3)
gatgctccggaatgttgctga

SEQ ID NO: 2963 - RNA, 23 nt, synthetic construct
  source 1..23: mol_type = other RNA
  modified_base 1: mod_base = OTHER; note = 2'-O-methyluridine-3'-phosphorothioate
  modified_base 2: mod_base = OTHER; note = 2'-fluorocytidine-3'-phosphorothioate
  modified_base 3: mod_base = OTHER; note = 2'-O-methyladenosine-3'-phosphate
  modified_base 4: mod_base = OTHER; note = 2'-O-methylguanosine-3'-phosphate
  modified_base 5: mod_base = OTHER; note = 2'-O-methylcytidine-3'-phosphate
  modified_base 6: mod_base = OTHER; note = 2'-fluoroadenosine-3'-phosphate
  modified_base 7: mod_base = OTHER; note = 2'-O-methyladenosine-3'-phosphate
  modified_base 8: mod_base = OTHER; note = 2'-fluorocytidine-3'-phosphate
  modified_base 9: mod_base = OTHER; note = 2'-fluoroadenosine-3'-phosphate
  modified_base 10: mod_base = OTHER; note = 2'-O-methyluridine-3'-phosphate
  modified_base 11: mod_base = OTHER; note = 2'-O-methyluridine-3'-phosphate
  modified_base 12: mod_base = OTHER; note = 2'-O-methylcytidine-3'-phosphate
  modified_base 13: mod_base = OTHER; note = 2'-O-methylcytidine-3'-phosphate
  modified_base 14: mod_base = OTHER; note = 2'-fluoroguanosine-3'-phosphate
  modified_base 15: mod_base = OTHER; note = 2'-O-methylguanosine-3'-phosphate
  modified_base 16: mod_base = OTHER; note = 2'-fluoroadenosine-3'-phosphate
  modified_base 17: mod_base = OTHER; note = 2'-O-methylguanosine-3'-phosphate
  modified_base 18: mod_base = OTHER; note = 2'-O-methylcytidine-3'-phosphate
  modified_base 19: mod_base = OTHER; note = 2'-O-methyladenosine-3'-phosphate
  modified_base 20: mod_base = OTHER; note = 2'-O-methyluridine-3'-phosphate
  modified_base 21: mod_base = OTHER; note = 2'-O-methylcytidine-3'- phosphorothioate
  modified_base 22: mod_base = OTHER; note = 2'-O-methylcytidine-3'- phosphorothioate
  modified_base 23: mod_base = OTHER; note = 2'-O-methyluridine-3'-phosphate
tcagcaacattccggagcatcct

SEQ ID NO: 2964 - RNA, 21 nt, synthetic construct
  source 1..21: mol_type = other RNA
  modified_base 1: mod_base = OTHER; note = 2'-O-methyladenosine-3'- phosphorothioate
  modified_base 2: mod_base = OTHER; note = 2'-O-methyluridine-3'-phosphorothioate
  modified_base 3: mod_base = OTHER; note = 2'-O-methylguanosine-3'-phosphate
  modified_base 4: mod_base = OTHER; note = 2'-O-methylcytidine-3'-phosphate
  modified_base 5: mod_base = OTHER; note = 2'-O-methyluridine-3'-phosphate
  modified_base 6: mod_base = OTHER; note = 2'-O-methylcytidine-3'-phosphate
  modified_base 7: mod_base = OTHER; note = 2'-fluorocytidine-3'-phosphate
  modified_base 8: mod_base = OTHER; note = 2'-O-methylguanosine-3'-phosphate
  modified_base 9: mod_base = OTHER; note = 2'-fluoroguanosine-3'-phosphate
  modified_base 10: mod_base = OTHER; note = 2'-fluoroadenosine-3'-phosphate
  modified_base 11: mod_base = OTHER; note = 2'-fluoroadenosine-3'-phosphate
  modified_base 12: mod_base = OTHER; note = 2'-O-methyluridine-3'-phosphate
  modified_base 13: mod_base = OTHER; note = 2'-O-methylguanosine-3'-phosphate
  modified_base 14: mod_base = OTHER; note = 2'-O-methyluridine-3'-phosphate
  modified_base 15: mod_base = OTHER; note = 2'-O-methyluridine-3'-phosphate
  modified_base 16: mod_base = OTHER; note = 2'-O-methylguanosine-3'-phosphate
  modified_base 17: mod_base = OTHER; note = 2'-O-methylcytidine-3'-phosphate
  modified_base 18: mod_base = OTHER; note = 2'-O-methyluridine-3'-phosphate
  modified_base 19: mod_base = OTHER; note = 2'-O-methylguanosine-3'-phosphate
  modified_base 20: mod_base = OTHER; note = 2'-O-methyladenosine-3'-phosphate
  modified_base 21: mod_base = OTHER; note 2'-O-methyladenosine-3'-phosphate-N-[tris(GalNAc-alkyl)-ami dodecanoyl)]-4-hydroxyprolinol (Hyp-(GalNAc-alkyl)3)
atgctccggaatgttgctgaa

SEQ ID NO: 2965 - RNA, 23 nt, synthetic construct
  source 1..23: mol_type = other RNA
  modified_base 1: mod_base = OTHER; note = 2'-O-methyluridine-3'-phosphorothioate
  modified_base 2: mod_base = OTHER; note = 2'-fluorouridine -3'-phosphorothioate
  modified_base 3: mod_base = OTHER; note = 2'-O-methylcytidine-3'-phosphate
  modified_base 4: mod_base = OTHER; note = 2'-O-methyladenosine-3'-phosphate
  modified_base 5: mod_base = OTHER; note = 2'-O-methylguanosine-3'-phosphate
  modified_base 6: mod_base = OTHER; note = 2'-fluorocytidine-3'-phosphate
  modified_base 7: mod_base = OTHER; note = 2'-O-methyladenosine-3'-phosphate
  modified_base 8: mod_base = OTHER; note = 2'-fluoroadenosine-3'-phosphate
  modified_base 9: mod_base = OTHER; note = 2'-fluorocytidine-3'-phosphate
  modified_base 10: mod_base = OTHER; note = 2'-O-methyladenosine-3'-phosphate
  modified_base 11: mod_base = OTHER; note = 2'-O-methyluridine-3'-phosphate
  modified_base 12: mod_base = OTHER; note = 2'-O-methyluridine-3'-phosphate
  modified_base 13: mod_base = OTHER; note = 2'-O-methylcytidine-3'-phosphate
  modified_base 14: mod_base = OTHER; note = 2'-fluorocytidine-3'-phosphate
  modified_base 15: mod_base = OTHER; note = 2'-O-methylguanosine-3'-phosphate
  modified_base 16: mod_base = OTHER; note = 2'-fluoroguanosine-3'-phosphate
  modified_base 17: mod_base = OTHER; note = 2'-O-methyladenosine-3'-phosphate
  modified_base 18: mod_base = OTHER; note = 2'-O-methylguanosine-3'-phosphate
  modified_base 19: mod_base = OTHER; note = 2'-O-methylcytidine-3'-phosphate
  modified_base 20: mod_base = OTHER; note = 2'-O-methyladenosine-3'-phosphate
  modified_base 21: mod_base = OTHER; note = 2'-O-methyluridine-3'-phosphorothioate
  modified_base 22: mod_base = OTHER; note = 2'-O-methylcytidine-3'- phosphorothioate
  modified_base 23: mod_base = OTHER; note = 2'-O-methylcytidine-3'-phosphate
ttcagcaacattccggagcatcc

SEQ ID NO: 2966 - RNA, 21 nt, synthetic construct
  source 1..21: mol_type = other RNA
  modified_base 1: mod_base = OTHER; note = 2'-O-methylcytidine-3'- phosphorothioate
  modified_base 2: mod_base = OTHER; note = 2'-O-methyladenosine-3'- phosphorothioate
  modified_base 3: mod_base = OTHER; note = 2'-O-methyladenosine-3'-phosphate
  modified_base 4: mod_base = OTHER; note = 2'-O-methylguanosine-3'-phosphate
  modified_base 5: mod_base = OTHER; note = 2'-O-methylguanosine-3'-phosphate
  modified_base 6: mod_base = OTHER; note = 2'-O-methyladenosine-3'-phosphate
  modified_base 7: mod_base = OTHER; note = 2'-fluorouridine-3'-phosphate
  modified_base 8: mod_base = OTHER; note = 2'-O-methylguanosine-3'-phosphate
  modified_base 9: mod_base = OTHER; note = 2'-fluorocytidine-3'-phosphate
  modified_base 10: mod_base = OTHER; note = 2'-fluorouridine-3'-phosphate
  modified_base 11: mod_base = OTHER; note = 2'-fluorocytidine-3'-phosphate
  modified_base 12: mod_base = OTHER; note = 2'-O-methylcytidine-3'-phosphate
  modified_base 13: mod_base = OTHER; note = 2'-O-methylguanosine-3'-phosphate
  modified_base 14: mod_base = OTHER; note = 2'-O-methylguanosine-3'-phosphate
  modified_base 15: mod_base = OTHER; note = 2'-O-methyladenosine-3'-phosphate
  modified_base 16: mod_base = OTHER; note = 2'-O-methyladenosine-3'-phosphate
  modified_base 17: mod_base = OTHER; note = 2'-O-methyluridine-3'-phosphate
  modified_base 18: mod_base = OTHER; note = 2'-O-methylguanosine-3'-phosphate
  modified_base 19: mod_base = OTHER; note = 2'-O-methyluridine-3'-phosphate
  modified_base 20: mod_base = OTHER; note = 2'-O-methyluridine-3'-phosphate
  modified_base 21: mod_base = OTHER; note 2'-O-methylguanosine-3'-phosphate-N-[tris(GalNAc-alkyl)-ami dodecanoyl)]-4-hydroxyprolinol (Hyp-(GalNAc-alkyl)3)
caaggatgctccggaatgttg

SEQ ID NO: 2967 - RNA, 23 nt, synthetic construct
  source 1..23: mol_type = other RNA
  modified_base 1: mod_base = OTHER; note = 2'-O-methylcytidine-3'- phosphorothioate
  modified_base 2: mod_base = OTHER; note = 2'-fluoroadenosine-3'-phosphorothioate
  modified_base 3: mod_base = OTHER; note = 2'-O-methyladenosine-3'-phosphate
  modified_base 4: mod_base = OTHER; note = 2'-O-methylcytidine-3'-phosphate
  modified_base 5: mod_base = OTHER; note = 2'-O-methyladenosine-3'-phosphate
  modified_base 6: mod_base = OTHER; note = 2'-fluorouridine-3'-phosphate
  modified_base 7: mod_base = OTHER; note = 2'-O-methyluridine-3'-phosphate
  modified_base 8: mod_base = OTHER; note = 2'-fluorocytidine-3'-phosphate
  modified_base 9: mod_base = OTHER; note = 2'-fluorocytidine-3'-phosphate
  modified_base 10: mod_base = OTHER; note = 2'-O-methylguanosine-3'-phosphate
  modified_base 11: mod_base = OTHER; note = 2'-O-methylguanosine-3'-phosphate
  modified_base 12: mod_base = OTHER; note = 2'-O-methyladenosine-3'-phosphate
  modified_base 13: mod_base = OTHER; note = 2'-O-methylguanosine-3'-phosphate
  modified_base 14: mod_base = OTHER; note = 2'-fluorocytidine-3'-phosphate
  modified_base 15: mod_base = OTHER; note = 2'-O-methyladenosine-3'-phosphate
  modified_base 16: mod_base = OTHER; note = 2'-fluorouridine-3'-phosphate
  modified_base 17: mod_base = OTHER; note = 2'-O-methylcytidine-3'-phosphate
  modified_base 18: mod_base = OTHER; note = 2'-O-methylcytidine-3'-phosphate
  modified_base 19: mod_base = OTHER; note = 2'-O-methyluridine-3'-phosphate
  modified_base 20: mod_base = OTHER; note = 2'-O-methyluridine-3'-phosphate
  modified_base 21: mod_base = OTHER; note = 2'-O-methylguanosine-3'- phosphorothioate
  modified_base 22: mod_base = OTHER; note = 2'-O-methylguanosine-3'- phosphorothioate
  modified_base 23: mod_base = OTHER; note = 2'-O-methyladenosine-3'-phosphate
caacattccggagcatccttgga

SEQ ID NO: 2968 - RNA, 21 nt, synthetic construct
  source 1..21: mol_type = other RNA
  modified_base 1: mod_base = OTHER; note = 2'-O-methylcytidine-3'- phosphorothioate
  modified_base 2: mod_base = OTHER; note = 2'-O-methylcytidine-3'- phosphorothioate
  modified_base 3: mod_base = OTHER; note = 2'-O-methyladenosine-3'-phosphate
  modified_base 4: mod_base = OTHER; note = 2'-O-methyladenosine-3'-phosphate
  modified_base 5: mod_base = OTHER; note = 2'-O-methylguanosine-3'-phosphate
  modified_base 6: mod_base = OTHER; note = 2'-O-methylguanosine-3'-phosphate
  modified_base 7: mod_base = OTHER; note = 2'-fluoroadenosine-3'-phosphate
  modified_base 8: mod_base = OTHER; note = 2'-O-methyluridine-3'-phosphate
  modified_base 9: mod_base = OTHER; note = 2'-fluoroguanosine-3'-phosphate
  modified_base 10: mod_base = OTHER; note = 2'-fluorocytidine-3'-phosphate
  modified_base 11: mod_base = OTHER; note = 2'-fluorouridine-3'-phosphate
  modified_base 12: mod_base = OTHER; note = 2'-O-methylcytidine-3'-phosphate
  modified_base 13: mod_base = OTHER; note = 2'-O-methylcytidine-3'-phosphate
  modified_base 14: mod_base = OTHER; note = 2'-O-methylguanosine-3'-phosphate
  modified_base 15: mod_base = OTHER; note = 2'-O-methylguanosine-3'-phosphate
  modified_base 16: mod_base = OTHER; note = 2'-O-methyladenosine-3'-phosphate
  modified_base 17: mod_base = OTHER; note = 2'-O-methyladenosine-3'-phosphate
  modified_base 18: mod_base = OTHER; note = 2'-O-methyluridine-3'-phosphate
  modified_base 19: mod_base = OTHER; note = 2'-O-methylguanosine-3'-phosphate
  modified_base 20: mod_base = OTHER; note = 2'-O-methyluridine-3'-phosphate
  modified_base 21: mod_base = OTHER; note 2'-O-methyluridine-3'-phosphate-N-[tris(GalNAc-alkyl)-amido decanoyl)]-4-hydroxyprolinol (Hyp-(GalNAc-alkyl)3)
ccaaggatgctccggaatgtt

SEQ ID NO: 2969 - RNA, 23 nt, synthetic construct
  source 1..23: mol_type = other RNA
  modified_base 1: mod_base = OTHER; note = 2'-O-methyladenosine-3'- phosphorothioate
  modified_base 2: mod_base = OTHER; note = 2'-fluoroadenosine-3'-phosphorothioate
  modified_base 3: mod_base = OTHER; note = 2'-O-methylcytidine-3'-phosphate
  modified_base 4: mod_base = OTHER; note = 2'-O-methyladenosine-3'-phosphate
  modified_base 5: mod_base = OTHER; note = 2'-O-methyluridine-3'-phosphate
  modified_base 6: mod_base = OTHER; note = 2'-fluorouridine-3'-phosphate
  modified_base 7: mod_base = OTHER; note = 2'-O-methylcytidine-3'-phosphate
  modified_base 8: mod_base = OTHER; note = 2'-fluorocytidine-3'-phosphate
  modified_base 9: mod_base = OTHER; note = 2'-fluoroguanosine-3'-phosphate
  modified_base 10: mod_base = OTHER; note = 2'-O-methylguanosine-3'-phosphate
  modified_base 11: mod_base = OTHER; note = 2'-O-methyladenosine-3'-phosphate
  modified_base 12: mod_base = OTHER; note = 2'-O-methylguanosine-3'-phosphate
  modified_base 13: mod_base = OTHER; note = 2'-O-methylcytidine-3'-phosphate
  modified_base 14: mod_base = OTHER; note = 2'-fluoroadenosine-3'-phosphate
  modified_base 15: mod_base = OTHER; note = 2'-O-methyluridine-3'-phosphate
  modified_base 16: mod_base = OTHER; note = 2'-fluorocytidine-3'-phosphate
  modified_base 17: mod_base = OTHER; note = 2'-O-methylcytidine-3'-phosphate
  modified_base 18: mod_base = OTHER; note = 2'-O-methyluridine-3'-phosphate
  modified_base 19: mod_base = OTHER; note = 2'-O-methyluridine-3'-phosphate
  modified_base 20: mod_base = OTHER; note = 2'-O-methylguanosine-3'-phosphate
  modified_base 21: mod_base = OTHER; note = 2'-O-methylguanosine-3'- phosphorothioate
  modified_base 22: mod_base = OTHER; note = 2'-O-methyladenosine-3'- phosphorothioate
  modified_base 23: mod_base = OTHER; note = 2'-O-methyluridine-3'-phosphate
aacattccggagcatccttggat

SEQ ID NO: 2970 - RNA, 21 nt, synthetic construct
  source 1..21: mol_type = other RNA
  modified_base 1: mod_base = OTHER; note = 2'-O-methylguanosine-3'- phosphorothioate
  modified_base 2: mod_base = OTHER; note = 2'-O-methylcytidine-3'- phosphorothioate
  modified_base 3: mod_base = OTHER; note = 2'-O-methylguanosine-3'-phosphate
  modified_base 4: mod_base = OTHER; note = 2'-O-methyluridine-3'-phosphate
  modified_base 5: mod_base = OTHER; note = 2'-O-methyladenosine-3'-phosphate
  modified_base 6: mod_base = OTHER; note = 2'-O-methyladenosine-3'-phosphate
  modified_base 7: mod_base = OTHER; note = 2'-fluorocytidine-3'-phosphate
  modified_base 8: mod_base = OTHER; note = 2'-O-methyladenosine-3'-phosphate
  modified_base 9: mod_base = OTHER; note = 2'-fluoroguanosine-3'-phosphate
  modified_base 10: mod_base = OTHER; note = 2'-fluoroadenosine-3'-phosphate
  modified_base 11: mod_base = OTHER; note = 2'-fluorouridine-3'-phosphate
  modified_base 12: mod_base = OTHER; note = 2'-O-methyluridine-3'-phosphate
  modified_base 13: mod_base = OTHER; note = 2'-O-methylcytidine-3'-phosphate
  modified_base 14: mod_base = OTHER; note = 2'-O-methyladenosine-3'-phosphate
  modified_base 15: mod_base = OTHER; note = 2'-O-methyladenosine-3'-phosphate
  modified_base 16: mod_base = OTHER; note = 2'-O-methyladenosine-3'-phosphate
  modified_base 17: mod_base = OTHER; note = 2'-O-methylcytidine-3'-phosphate
  modified_base 18: mod_base = OTHER; note = 2'-O-methyluridine-3'-phosphate
  modified_base 19: mod_base = OTHER; note = 2'-O-methylguanosine-3'-phosphate
  modified_base 20: mod_base = OTHER; note = 2'-O-methylcytidine-3'-phosphate
  modified_base 21: mod_base = OTHER; note 2'-O-methylcytidine-3'-phosphate-N-[tris(GalNAc-alkyl)-amid odecanoyl)]-4-hydroxyprolinol (Hyp-(GalNAc-alkyl)3)
gcgtaacagattcaaactgcc

SEQ ID NO: 2971 - RNA, 23 nt, synthetic construct
  source 1..23: mol_type = other RNA
  modified_base 1: mod_base = OTHER; note = 2'-O-methylguanosine-3'- phosphorothioate
  modified_base 2: mod_base = OTHER; note = 2'-fluoroguanosine-3'-phosphorothioate
  modified_base 3: mod_base = OTHER; note = 2'-O-methylcytidine-3'-phosphate
  modified_base 4: mod_base = OTHER; note = 2'-O-methyladenosine-3'-phosphate
  modified_base 5: mod_base = OTHER; note = 2'-O-methylguanosine-3'-phosphate
  modified_base 6: mod_base = OTHER; note = 2'-fluorouridine-3'-phosphate
  modified_base 7: mod_base = OTHER; note = 2'-O-methyluridine-3'-phosphate
  modified_base 8: mod_base = OTHER; note = 2'-fluorouridine-3'-phosphate
  modified_base 9: mod_base = OTHER; note = 2'-fluoroguanosine-3'-phosphate
  modified_base 10: mod_base = OTHER; note = 2'-O-methyladenosine-3'-phosphate
  modified_base 11: mod_base = OTHER; note = 2'-O-methyladenosine-3'-phosphate
  modified_base 12: mod_base = OTHER; note = 2'-O-methyluridine-3'-phosphate
  modified_base 13: mod_base = OTHER; note = 2'-O-methylcytidine-3'-phosphate
  modified_base 14: mod_base = OTHER; note = 2'-fluorouridine-3'-phosphate
  modified_base 15: mod_base = OTHER; note = 2'-O-methylguanosine-3'-phosphate
  modified_base 16: mod_base = OTHER; note = 2'-fluorouridine-3'-phosphate
  modified_base 17: mod_base = OTHER; note = 2'-O-methyluridine-3'-phosphate
  modified_base 18: mod_base = OTHER; note = 2'-O-methyladenosine-3'-phosphate
  modified_base 19: mod_base = OTHER; note = 2'-O-methylcytidine-3'-phosphate
  modified_base 20: mod_base = OTHER; note = 2'-O-methylguanosine-3'-phosphate
  modified_base 21: mod_base = OTHER; note = 2'-O-methylcytidine-3'- phosphorothioate
  modified_base 22: mod_base = OTHER; note = 2'-O-methyladenosine-3'- phosphorothioate
  modified_base 23: mod_base = OTHER; note = 2'-O-methylcytidine-3'-phosphate
ggcagtttgaatctgttacgcac

SEQ ID NO: 2972 - RNA, 21 nt, synthetic construct
  source 1..21: mol_type = other RNA
  modified_base 1: mod_base = OTHER; note = 2'-O-methylcytidine-3'- phosphorothioate
  modified_base 2: mod_base = OTHER; note = 2'-O-methylguanosine-3'- phosphorothioate
  modified_base 3: mod_base = OTHER; note = 2'-O-methyluridine-3'-phosphate
  modified_base 4: mod_base = OTHER; note = 2'-O-methyladenosine-3'-phosphate
  modified_base 5: mod_base = OTHER; note = 2'-O-methyladenosine-3'-phosphate
  modified_base 6: mod_base = OTHER; note = 2'-O-methylcytidine-3'-phosphate
  modified_base 7: mod_base = OTHER; note = 2'-fluoroadenosine-3'-phosphate
  modified_base 8: mod_base = OTHER; note = 2'-O-methylguanosine-3'-phosphate
  modified_base 9: mod_base = OTHER; note = 2'-fluoroadenosine-3'-phosphate
  modified_base 10: mod_base = OTHER; note = 2'-fluorouridine-3'-phosphate
  modified_base 11: mod_base = OTHER; note = 2'-fluorouridine-3'-phosphate
  modified_base 12: mod_base = OTHER; note = 2'-O-methylcytidine-3'-phosphate
  modified_base 13: mod_base = OTHER; note = 2'-O-methyladenosine-3'-phosphate
  modified_base 14: mod_base = OTHER; note = 2'-O-methyladenosine-3'-phosphate
  modified_base 15: mod_base = OTHER; note = 2'-O-methyladenosine-3'-phosphate
  modified_base 16: mod_base = OTHER; note = 2'-O-methylcytidine-3'-phosphate
  modified_base 17: mod_base = OTHER; note = 2'-O-methyluridine-3'-phosphate
  modified_base 18: mod_base = OTHER; note = 2'-O-methylguanosine-3'-phosphate
  modified_base 19: mod_base = OTHER; note = 2'-O-methylcytidine-3'-phosphate
  modified_base 20: mod_base = OTHER; note = 2'-O-methylcytidine-3'-phosphate
  modified_base 21: mod_base = OTHER; note 2'-O-methylguanosine-3'-phosphate-N-[tris(GalNAc-alkyl)-ami dodecanoyl)]-4-hydroxyprolinol (Hyp-(GalNAc-alkyl)3)
cgtaacagattcaaactgccg

SEQ ID NO: 2973 - RNA, 23 nt, synthetic construct
  source 1..23: mol_type = other RNA
  modified_base 1: mod_base = OTHER; note = 2'-O-methylcytidine-3'- phosphorothioate
  modified_base 2: mod_base = OTHER; note = 2'-fluoroguanosine-3'-phosphorothioate
  modified_base 3: mod_base = OTHER; note = 2'-O-methylguanosine-3'-phosphate
  modified_base 4: mod_base = OTHER; note = 2'-O-methylcytidine-3'-phosphate
  modified_base 5: mod_base = OTHER; note = 2'-O-methyladenosine-3'-phosphate
  modified_base 6: mod_base = OTHER; note = 2'-fluoroguanosine-3'-phosphate
  modified_base 7: mod_base = OTHER; note = 2'-O-methyluridine-3'-phosphate
  modified_base 8: mod_base = OTHER; note = 2'-fluorouridine-3'-phosphate
  modified_base 9: mod_base = OTHER; note = 2'-fluorouridine-3'-phosphate
  modified_base 10: mod_base = OTHER; note = 2'-O-methylguanosine-3'-phosphate
  modified_base 11: mod_base = OTHER; note = 2'-O-methyladenosine-3'-phosphate
  modified_base 12: mod_base = OTHER; note = 2'-O-methyladenosine-3'-phosphate
  modified_base 13: mod_base = OTHER; note = 2'-O-methyluridine-3'-phosphate
  modified_base 14: mod_base = OTHER; note = 2'-fluorocytidine-3'-phosphate
  modified_base 15: mod_base = OTHER; note = 2'-O-methyluridine-3'-phosphate
  modified_base 16: mod_base = OTHER; note = 2'-fluoroguanosine-3'-phosphate
  modified_base 17: mod_base = OTHER; note = 2'-O-methyluridine-3'-phosphate
  modified_base 18: mod_base = OTHER; note = 2'-O-methyluridine-3'-phosphate
  modified_base 19: mod_base = OTHER; note = 2'-O-methyladenosine-3'-phosphate
  modified_base 20: mod_base = OTHER; note = 2'-O-methylcytidine-3'-phosphate
  modified_base 21: mod_base = OTHER; note = 2'-O-methylguanosine-3'- phosphorothioate
  modified_base 22: mod_base = OTHER; note = 2'-O-methylcytidine-3'- phosphorothioate
  modified_base 23: mod_base = OTHER; note = 2'-O-methyladenosine-3'-phosphate
cggcagtttgaatctgttacgca

SEQ ID NO: 2974 - RNA, 21 nt, synthetic construct
  source 1..21: mol_type = other RNA
  modified_base 1: mod_base = OTHER; note = 2'-O-methyladenosine-3'- phosphorothioate
  modified_base 2: mod_base = OTHER; note = 2'-O-methyluridine-3'-phosphorothioate
  modified_base 3: mod_base = OTHER; note = 2'-O-methylguanosine-3'-phosphate
  modified_base 4: mod_base = OTHER; note = 2'-O-methyluridine-3'-phosphate
  modified_base 5: mod_base = OTHER; note = 2'-O-methylguanosine-3'-phosphate
  modified_base 6: mod_base = OTHER; note = 2'-O-methylcytidine-3'-phosphate
  modified_base 7: mod_base = OTHER; note = 2'-fluoroguanosine-3'-phosphate
  modified_base 8: mod_base = OTHER; note = 2'-O-methyluridine-3'-phosphate
  modified_base 9: mod_base = OTHER; note = 2'-fluoroadenosine-3'-phosphate
  modified_base 10: mod_base = OTHER; note = 2'-fluoroadenosine-3'-phosphate
  modified_base 11: mod_base = OTHER; note = 2'-fluorocytidine-3'-phosphate
  modified_base 12: mod_base = OTHER; note = 2'-O-methyladenosine-3'-phosphate
  modified_base 13: mod_base = OTHER; note = 2'-O-methylguanosine-3'-phosphate
  modified_base 14: mod_base = OTHER; note = 2'-O-methyladenosine-3'-phosphate
  modified_base 15: mod_base = OTHER; note = 2'-O-methyluridine-3'-phosphate
  modified_base 16: mod_base = OTHER; note = 2'-O-methyluridine-3'-phosphate
  modified_base 17: mod_base = OTHER; note = 2'-O-methylcytidine-3'-phosphate
  modified_base 18: mod_base = OTHER; note = 2'-O-methyladenosine-3'-phosphate
  modified_base 19: mod_base = OTHER; note = 2'-O-methyladenosine-3'-phosphate
  modified_base 20: mod_base = OTHER; note = 2'-O-methyladenosine-3'-phosphate
  modified_base 21: mod_base = OTHER; note 2'-O-methylcytidine-3'-phosphate-N-[tris(GalNAc-alkyl)-amid odecanoyl)]-4-hydroxyprolinol (Hyp-(GalNAc-alkyl)3)
atgtgcgtaacagattcaaac

SEQ ID NO: 2975 - RNA, 23 nt, synthetic construct
  source 1..23: mol_type = other RNA
  modified_base 1: mod_base = OTHER; note = 2'-O-methylguanosine-3'- phosphorothioate
  modified_base 2: mod_base = OTHER; note = 2'-fluorouridine -3'-phosphorothioate
  modified_base 3: mod_base = OTHER; note = 2'-O-methyluridine-3'-phosphate
  modified_base 4: mod_base = OTHER; note = 2'-O-methyluridine-3'-phosphate
  modified_base 5: mod_base = OTHER; note = 2'-O-methylguanosine-3'-phosphate
  modified_base 6: mod_base = OTHER; note = 2'-fluoroadenosine-3'-phosphate
  modified_base 7: mod_base = OTHER; note = 2'-O-methyladenosine-3'-phosphate
  modified_base 8: mod_base = OTHER; note = 2'-fluorouridine-3'-phosphate
  modified_base 9: mod_base = OTHER; note = 2'-fluorocytidine-3'-phosphate
  modified_base 10: mod_base = OTHER; note = 2'-O-methyluridine-3'-phosphate
  modified_base 11: mod_base = OTHER; note = 2'-O-methylguanosine-3'-phosphate
  modified_base 12: mod_base = OTHER; note = 2'-O-methyluridine-3'-phosphate
  modified_base 13: mod_base = OTHER; note = 2'-O-methyluridine-3'-phosphate
  modified_base 14: mod_base = OTHER; note = 2'-fluoroadenosine-3'-phosphate
  modified_base 15: mod_base = OTHER; note = 2'-O-methylcytidine-3'-phosphate
  modified_base 16: mod_base = OTHER; note = 2'-fluoroguanosine-3'-phosphate
  modified_base 17: mod_base = OTHER; note = 2'-O-methylcytidine-3'-phosphate
  modified_base 18: mod_base = OTHER; note = 2'-O-methyladenosine-3'-phosphate
  modified_base 19: mod_base = OTHER; note = 2'-O-methylcytidine-3'-phosphate
  modified_base 20: mod_base = OTHER; note = 2'-O-methyladenosine-3'-phosphate
  modified_base 21: mod_base = OTHER; note = 2'-O-methyluridine-3'-phosphorothioate
  modified_base 22: mod_base = OTHER; note = 2'-O-methylcytidine-3'- phosphorothioate
  modified_base 23: mod_base = OTHER; note = 2'-O-methyladenosine-3'-phosphate
gtttgaatctgttacgcacatca

SEQ ID NO: 2976 - RNA, 21 nt, synthetic construct
  source 1..21: mol_type = other RNA
  modified_base 1: mod_base = OTHER; note = 2'-O-methylguanosine-3'- phosphorothioate
  modified_base 2: mod_base = OTHER; note = 2'-O-methyladenosine-3'- phosphorothioate
  modified_base 3: mod_base = OTHER; note = 2'-O-methyluridine-3'-phosphate
  modified_base 4: mod_base = OTHER; note = 2'-O-methylguanosine-3'-phosphate
  modified_base 5: mod_base = OTHER; note = 2'-O-methyluridine-3'-phosphate
  modified_base 6: mod_base = OTHER; note = 2'-O-methylguanosine-3'-phosphate
  modified_base 7: mod_base = OTHER; note = 2'-fluorocytidine-3'-phosphate
  modified_base 8: mod_base = OTHER; note = 2'-O-methylguanosine-3'-phosphate
  modified_base 9: mod_base = OTHER; note = 2'-fluorouridine-3'-phosphate
  modified_base 10: mod_base = OTHER; note = 2'-fluoroadenosine-3'-phosphate
  modified_base 11: mod_base = OTHER; note = 2'-fluoroadenosine-3'-phosphate
  modified_base 12: mod_base = OTHER; note = 2'-O-methylcytidine-3'-phosphate
  modified_base 13: mod_base = OTHER; note = 2'-O-methyladenosine-3'-phosphate
  modified_base 14: mod_base = OTHER; note = 2'-O-methylguanosine-3'-phosphate
  modified_base 15: mod_base = OTHER; note = 2'-O-methyladenosine-3'-phosphate
  modified_base 16: mod_base = OTHER; note = 2'-O-methyluridine-3'-phosphate
  modified_base 17: mod_base = OTHER; note = 2'-O-methyluridine-3'-phosphate
  modified_base 18: mod_base = OTHER; note = 2'-O-methylcytidine-3'-phosphate
  modified_base 19: mod_base = OTHER; note = 2'-O-methyladenosine-3'-phosphate
  modified_base 20: mod_base = OTHER; note = 2'-O-methyladenosine-3'-phosphate
  modified_base 21: mod_base = OTHER; note 2'-O-methyladenosine-3'-phosphate-N-[tris(GalNAc-alkyl)-ami dodecanoyl)]-4-hydroxyprolinol (Hyp-(GalNAc-alkyl)3)
gatgtgcgtaacagattcaaa

SEQ ID NO: 2977 - RNA, 23 nt, synthetic construct
  source 1..23: mol_type = other RNA
  modified_base 1: mod_base = OTHER; note = 2'-O-methyluridine-3'-phosphorothioate
  modified_base 2: mod_base = OTHER; note = 2'-fluorouridine -3'-phosphorothioate
  modified_base 3: mod_base = OTHER; note = 2'-O-methyluridine-3'-phosphate
  modified_base 4: mod_base = OTHER; note = 2'-O-methylguanosine-3'-phosphate
  modified_base 5: mod_base = OTHER; note = 2'-O-methyladenosine-3'-phosphate
  modified_base 6: mod_base = OTHER; note = 2'-fluoroadenosine-3'-phosphate
  modified_base 7: mod_base = OTHER; note = 2'-O-methyluridine-3'-phosphate
  modified_base 8: mod_base = OTHER; note = 2'-fluorocytidine-3'-phosphate
  modified_base 9: mod_base = OTHER; note = 2'-fluorouridine-3'-phosphate
  modified_base 10: mod_base = OTHER; note = 2'-O-methylguanosine-3'-phosphate
  modified_base 11: mod_base = OTHER; note = 2'-O-methyluridine-3'-phosphate
  modified_base 12: mod_base = OTHER; note = 2'-O-methyluridine-3'-phosphate
  modified_base 13: mod_base = OTHER; note = 2'-O-methyladenosine-3'-phosphate
  modified_base 14: mod_base = OTHER; note = 2'-fluorocytidine-3'-phosphate
  modified_base 15: mod_base = OTHER; note = 2'-O-methylguanosine-3'-phosphate
  modified_base 16: mod_base = OTHER; note = 2'-fluorocytidine-3'-phosphate
  modified_base 17: mod_base = OTHER; note = 2'-O-methyladenosine-3'-phosphate
  modified_base 18: mod_base = OTHER; note = 2'-O-methylcytidine-3'-phosphate
  modified_base 19: mod_base = OTHER; note = 2'-O-methyladenosine-3'-phosphate
  modified_base 20: mod_base = OTHER; note = 2'-O-methyluridine-3'-phosphate
  modified_base 21: mod_base = OTHER; note = 2'-O-methylcytidine-3'- phosphorothioate
  modified_base 22: mod_base = OTHER; note = 2'-O-methyladenosine-3'- phosphorothioate
  modified_base 23: mod_base = OTHER; note = 2'-O-methyluridine-3'-phosphate
tttgaatctgttacgcacatcat

SEQ ID NO: 2978 - RNA, 21 nt, synthetic construct
  source 1..21: mol_type = other RNA
  modified_base 1: mod_base = OTHER; note = 2'-O-methyladenosine-3'- phosphorothioate
  modified_base 2: mod_base = OTHER; note = 2'-O-methylguanosine-3'- phosphorothioate
  modified_base 3: mod_base = OTHER; note = 2'-O-methyladenosine-3'-phosphate
  modified_base 4: mod_base = OTHER; note = 2'-O-methylguanosine-3'-phosphate
  modified_base 5: mod_base = OTHER; note = 2'-O-methyladenosine-3'-phosphate
  modified_base 6: mod_base = OTHER; note = 2'-O-methyladenosine-3'-phosphate
  modified_base 7: mod_base = OTHER; note = 2'-fluoroguanosine-3'-phosphate
  modified_base 8: mod_base = OTHER; note = 2'-O-methyladenosine-3'-phosphate
  modified_base 9: mod_base = OTHER; note = 2'-fluorouridine-3'-phosphate
  modified_base 10: mod_base = OTHER; note = 2'-fluoroguanosine-3'-phosphate
  modified_base 11: mod_base = OTHER; note = 2'-fluoroguanosine-3'-phosphate
  modified_base 12: mod_base = OTHER; note = 2'-O-methylguanosine-3'-phosphate
  modified_base 13: mod_base = OTHER; note = 2'-O-methylcytidine-3'-phosphate
  modified_base 14: mod_base = OTHER; note = 2'-O-methyluridine-3'-phosphate
  modified_base 15: mod_base = OTHER; note = 2'-O-methyladenosine-3'-phosphate
  modified_base 16: mod_base = OTHER; note = 2'-O-methylcytidine-3'-phosphate
  modified_base 17: mod_base = OTHER; note = 2'-O-methyladenosine-3'-phosphate
  modified_base 18: mod_base = OTHER; note = 2'-O-methyladenosine-3'-phosphate
  modified_base 19: mod_base = OTHER; note = 2'-O-methylguanosine-3'-phosphate
  modified_base 20: mod_base = OTHER; note = 2'-O-methylguanosine-3'-phosphate
  modified_base 21: mod_base = OTHER; note 2'-O-methylcytidine-3'-phosphate-N-[tris(GalNAc-alkyl)-amid odecanoyl)]-4-hydroxyprolinol (Hyp-(GalNAc-alkyl)3)
agagaagatgggctacaaggc

SEQ ID NO: 2979 - RNA, 23 nt, synthetic construct
  source 1..23: mol_type = other RNA
  modified_base 1: mod_base = OTHER; note = 2'-O-methylguanosine-3'- phosphorothioate
  modified_base 2: mod_base = OTHER; note = 2'-fluorocytidine-3'-phosphorothioate
  modified_base 3: mod_base = OTHER; note = 2'-O-methylcytidine-3'-phosphate
  modified_base 4: mod_base = OTHER; note = 2'-O-methyluridine-3'-phosphate
  modified_base 5: mod_base = OTHER; note = 2'-O-methyluridine-3'-phosphate
  modified_base 6: mod_base = OTHER; note = 2'-fluoroguanosine-3'-phosphate
  modified_base 7: mod_base = OTHER; note = 2'-O-methyluridine-3'-phosphate
  modified_base 8: mod_base = OTHER; note = 2'-fluoroadenosine-3'-phosphate
  modified_base 9: mod_base = OTHER; note = 2'-fluoroguanosine-3'-phosphate
  modified_base 10: mod_base = OTHER; note = 2'-O-methylcytidine-3'-phosphate
  modified_base 11: mod_base = OTHER; note = 2'-O-methylcytidine-3'-phosphate
  modified_base 12: mod_base = OTHER; note = 2'-O-methylcytidine-3'-phosphate
  modified_base 13: mod_base = OTHER; note = 2'-O-methyladenosine-3'-phosphate
  modified_base 14: mod_base = OTHER; note = 2'-fluorouridine-3'-phosphate
  modified_base 15: mod_base = OTHER; note = 2'-O-methylcytidine-3'-phosphate
  modified_base 16: mod_base = OTHER; note = 2'-fluorouridine-3'-phosphate
  modified_base 17: mod_base = OTHER; note = 2'-O-methyluridine-3'-phosphate
  modified_base 18: mod_base = OTHER; note = 2'-O-methylcytidine-3'-phosphate
  modified_base 19: mod_base = OTHER; note = 2'-O-methyluridine-3'-phosphate
  modified_base 20: mod_base = OTHER; note = 2'-O-methylcytidine-3'-phosphate
  modified_base 21: mod_base = OTHER; note = 2'-O-methyluridine-3'-phosphorothioate
  modified_base 22: mod_base = OTHER; note = 2'-O-methylguanosine-3'- phosphorothioate
  modified_base 23: mod_base = OTHER; note = 2'-O-methylcytidine-3'-phosphate
gccttgtagcccatcttctctgc

SEQ ID NO: 2980 - RNA, 21 nt, synthetic construct
  source 1..21: mol_type = other RNA
  modified_base 1: mod_base = OTHER; note = 2'-O-methylguanosine-3'- phosphorothioate
  modified_base 2: mod_base = OTHER; note = 2'-O-methyladenosine-3'- phosphorothioate
  modified_base 3: mod_base = OTHER; note = 2'-O-methylguanosine-3'-phosphate
  modified_base 4: mod_base = OTHER; note = 2'-O-methyladenosine-3'-phosphate
  modified_base 5: mod_base = OTHER; note = 2'-O-methyladenosine-3'-phosphate
  modified_base 6: mod_base = OTHER; note = 2'-O-methylguanosine-3'-phosphate
  modified_base 7: mod_base = OTHER; note = 2'-fluoroadenosine-3'-phosphate
  modified_base 8: mod_base = OTHER; note = 2'-O-methyluridine-3'-phosphate
  modified_base 9: mod_base = OTHER; note = 2'-fluoroguanosine-3'-phosphate
  modified_base 10: mod_base = OTHER; note = 2'-fluoroguanosine-3'-phosphate
  modified_base 11: mod_base = OTHER; note = 2'-fluoroguanosine-3'-phosphate
  modified_base 12: mod_base = OTHER; note = 2'-O-methylcytidine-3'-phosphate
  modified_base 13: mod_base = OTHER; note = 2'-O-methyluridine-3'-phosphate
  modified_base 14: mod_base = OTHER; note = 2'-O-methyladenosine-3'-phosphate
  modified_base 15: mod_base = OTHER; note = 2'-O-methylcytidine-3'-phosphate
  modified_base 16: mod_base = OTHER; note = 2'-O-methyladenosine-3'-phosphate
  modified_base 17: mod_base = OTHER; note = 2'-O-methyladenosine-3'-phosphate
  modified_base 18: mod_base = OTHER; note = 2'-O-methylguanosine-3'-phosphate
  modified_base 19: mod_base = OTHER; note = 2'-O-methylguanosine-3'-phosphate
  modified_base 20: mod_base = OTHER; note = 2'-O-methylcytidine-3'-phosphate
  modified_base 21: mod_base = OTHER; note 2'-O-methylcytidine-3'-phosphate-N-[tris(GalNAc-alkyl)-amid odecanoyl)]-4-hydroxyprolinol (Hyp-(GalNAc-alkyl)3)
gagaagatgggctacaaggcc

SEQ ID NO: 2981 - RNA, 23 nt, synthetic construct
  source 1..23: mol_type = other RNA
  modified_base 1: mod_base = OTHER; note = 2'-O-methylguanosine-3'- phosphorothioate
  modified_base 2: mod_base = OTHER; note = 2'-fluoroguanosine-3'-phosphorothioate
  modified_base 3: mod_base = OTHER; note = 2'-O-methylcytidine-3'-phosphate
  modified_base 4: mod_base = OTHER; note = 2'-O-methylcytidine-3'-phosphate
  modified_base 5: mod_base = OTHER; note = 2'-O-methyluridine-3'-phosphate
  modified_base 6: mod_base = OTHER; note = 2'-fluorouridine-3'-phosphate
  modified_base 7: mod_base = OTHER; note = 2'-O-methylguanosine-3'-phosphate
  modified_base 8: mod_base = OTHER; note = 2'-fluorouridine-3'-phosphate
  modified_base 9: mod_base = OTHER; note = 2'-fluoroadenosine-3'-phosphate
  modified_base 10: mod_base = OTHER; note = 2'-O-methylguanosine-3'-phosphate
  modified_base 11: mod_base = OTHER; note = 2'-O-methylcytidine-3'-phosphate
  modified_base 12: mod_base = OTHER; note = 2'-O-methylcytidine-3'-phosphate
  modified_base 13: mod_base = OTHER; note = 2'-O-methylcytidine-3'-phosphate
  modified_base 14: mod_base = OTHER; note = 2'-fluoroadenosine-3'-phosphate
  modified_base 15: mod_base = OTHER; note = 2'-O-methyluridine-3'-phosphate
  modified_base 16: mod_base = OTHER; note = 2'-fluorocytidine-3'-phosphate
  modified_base 17: mod_base = OTHER; note = 2'-O-methyluridine-3'-phosphate
  modified_base 18: mod_base = OTHER; note = 2'-O-methyluridine-3'-phosphate
  modified_base 19: mod_base = OTHER; note = 2'-O-methylcytidine-3'-phosphate
  modified_base 20: mod_base = OTHER; note = 2'-O-methyluridine-3'-phosphate
  modified_base 21: mod_base = OTHER; note = 2'-O-methylcytidine-3'- phosphorothioate
  modified_base 22: mod_base = OTHER; note = 2'-O-methyluridine-3'-phosphorothioate
  modified_base 23: mod_base = OTHER; note = 2'-O-methylguanosine-3'-phosphate
ggccttgtagcccatcttctctg

SEQ ID NO: 2982 - RNA, 21 nt, synthetic construct
  source 1..21: mol_type = other RNA
  modified_base 1: mod_base = OTHER; note = 2'-O-methyladenosine-3'- phosphorothioate
  modified_base 2: mod_base = OTHER; note = 2'-O-methylguanosine-3'- phosphorothioate
  modified_base 3: mod_base = OTHER; note = 2'-O-methylguanosine-3'-phosphate
  modified_base 4: mod_base = OTHER; note = 2'-O-methylcytidine-3'-phosphate
  modified_base 5: mod_base = OTHER; note = 2'-O-methyladenosine-3'-phosphate
  modified_base 6: mod_base = OTHER; note = 2'-O-methylguanosine-3'-phosphate
  modified_base 7: mod_base = OTHER; note = 2'-fluoroadenosine-3'-phosphate
  modified_base 8: mod_base = OTHER; note = 2'-O-methylguanosine-3'-phosphate
  modified_base 9: mod_base = OTHER; note = 2'-fluoroadenosine-3'-phosphate
  modified_base 10: mod_base = OTHER; note = 2'-fluoroadenosine-3'-phosphate
  modified_base 11: mod_base = OTHER; note = 2'-fluoroguanosine-3'-phosphate
  modified_base 12: mod_base = OTHER; note = 2'-O-methyladenosine-3'-phosphate
  modified_base 13: mod_base = OTHER; note = 2'-O-methyluridine-3'-phosphate
  modified_base 14: mod_base = OTHER; note = 2'-O-methylguanosine-3'-phosphate
  modified_base 15: mod_base = OTHER; note = 2'-O-methylguanosine-3'-phosphate
  modified_base 16: mod_base = OTHER; note = 2'-O-methylguanosine-3'-phosphate
  modified_base 17: mod_base = OTHER; note = 2'-O-methylcytidine-3'-phosphate
  modified_base 18: mod_base = OTHER; note = 2'-O-methyluridine-3'-phosphate
  modified_base 19: mod_base = OTHER; note = 2'-O-methyladenosine-3'-phosphate
  modified_base 20: mod_base = OTHER; note = 2'-O-methylcytidine-3'-phosphate
  modified_base 21: mod_base = OTHER; note 2'-O-methyladenosine-3'-phosphate-N-[tris(GalNAc-alkyl)-ami dodecanoyl)]-4-hydroxyprolinol (Hyp-(GalNAc-alkyl)3)
aggcagagaagatgggctaca

SEQ ID NO: 2983 - RNA, 23 nt, synthetic construct
  source 1..23: mol_type = other RNA
  modified_base 1: mod_base = OTHER; note = 2'-O-methyluridine-3'-phosphorothioate
  modified_base 2: mod_base = OTHER; note = 2'-fluoroguanosine-3'-phosphorothioate
  modified_base 3: mod_base = OTHER; note = 2'-O-methyluridine-3'-phosphate
  modified_base 4: mod_base = OTHER; note = 2'-O-methyladenosine-3'-phosphate
  modified_base 5: mod_base = OTHER; note = 2'-O-methylguanosine-3'-phosphate
  modified_base 6: mod_base = OTHER; note = 2'-fluorocytidine-3'-phosphate
  modified_base 7: mod_base = OTHER; note = 2'-O-methylcytidine-3'-phosphate
  modified_base 8: mod_base = OTHER; note = 2'-fluorocytidine-3'-phosphate
  modified_base 9: mod_base = OTHER; note = 2'-fluoroadenosine-3'-phosphate
  modified_base 10: mod_base = OTHER; note = 2'-O-methyluridine-3'-phosphate
  modified_base 11: mod_base = OTHER; note = 2'-O-methylcytidine-3'-phosphate
  modified_base 12: mod_base = OTHER; note = 2'-O-methyluridine-3'-phosphate
  modified_base 13: mod_base = OTHER; note = 2'-O-methyluridine-3'-phosphate
  modified_base 14: mod_base = OTHER; note = 2'-fluorocytidine-3'-phosphate
  modified_base 15: mod_base = OTHER; note = 2'-O-methyluridine-3'-phosphate
  modified_base 16: mod_base = OTHER; note = 2'-fluorocytidine-3'-phosphate
  modified_base 17: mod_base = OTHER; note = 2'-O-methyluridine-3'-phosphate
  modified_base 18: mod_base = OTHER; note = 2'-O-methylguanosine-3'-phosphate
  modified_base 19: mod_base = OTHER; note = 2'-O-methylcytidine-3'-phosphate
  modified_base 20: mod_base = OTHER; note = 2'-O-methylcytidine-3'-phosphate
  modified_base 21: mod_base = OTHER; note = 2'-O-methyluridine-3'-phosphorothioate
  modified_base 22: mod_base = OTHER; note = 2'-O-methylguanosine-3'- phosphorothioate
  modified_base 23: mod_base = OTHER; note = 2'-O-methylcytidine-3'-phosphate
tgtagcccatcttctctgcctgc

SEQ ID NO: 2984 - RNA, 21 nt, synthetic construct
  source 1..21: mol_type = other RNA
  modified_base 1: mod_base = OTHER; note = 2'-O-methylcytidine-3'- phosphorothioate
  modified_base 2: mod_base = OTHER; note = 2'-O-methyladenosine-3'- phosphorothioate
  modified_base 3: mod_base = OTHER; note = 2'-O-methylguanosine-3'-phosphate
  modified_base 4: mod_base = OTHER; note = 2'-O-methylguanosine-3'-phosphate
  modified_base 5: mod_base = OTHER; note = 2'-O-methylcytidine-3'-phosphate
  modified_base 6: mod_base = OTHER; note = 2'-O-methyladenosine-3'-phosphate
  modified_base 7: mod_base = OTHER; note = 2'-fluoroguanosine-3'-phosphate
  modified_base 8: mod_base = OTHER; note = 2'-O-methyladenosine-3'-phosphate
  modified_base 9: mod_base = OTHER; note = 2'-fluoroguanosine-3'-phosphate
  modified_base 10: mod_base = OTHER; note = 2'-fluoroadenosine-3'-phosphate
  modified_base 11: mod_base = OTHER; note = 2'-fluoroadenosine-3'-phosphate
  modified_base 12: mod_base = OTHER; note = 2'-O-methylguanosine-3'-phosphate
  modified_base 13: mod_base = OTHER; note = 2'-O-methyladenosine-3'-phosphate
  modified_base 14: mod_base = OTHER; note = 2'-O-methyluridine-3'-phosphate
  modified_base 15: mod_base = OTHER; note = 2'-O-methylguanosine-3'-phosphate
  modified_base 16: mod_base = OTHER; note = 2'-O-methylguanosine-3'-phosphate
  modified_base 17: mod_base = OTHER; note = 2'-O-methylguanosine-3'-phosphate
  modified_base 18: mod_base = OTHER; note = 2'-O-methylcytidine-3'-phosphate
  modified_base 19: mod_base = OTHER; note = 2'-O-methyluridine-3'-phosphate
  modified_base 20: mod_base = OTHER; note = 2'-O-methyladenosine-3'-phosphate
  modified_base 21: mod_base = OTHER; note 2'-O-methylcytidine-3'-phosphate-N-[tris(GalNAc-alkyl)-amid odecanoyl)]-4-hydroxyprolinol (Hyp-(GalNAc-alkyl)3)
caggcagagaagatgggctac

SEQ ID NO: 2985 - RNA, 23 nt, synthetic construct
  source 1..23: mol_type = other RNA
  modified_base 1: mod_base = OTHER; note = 2'-O-methylguanosine-3'- phosphorothioate
  modified_base 2: mod_base = OTHER; note = 2'-fluorouridine -3'-phosphorothioate
  modified_base 3: mod_base = OTHER; note = 2'-O-methyladenosine-3'-phosphate
  modified_base 4: mod_base = OTHER; note = 2'-O-methylguanosine-3'-phosphate
  modified_base 5: mod_base = OTHER; note = 2'-O-methylcytidine-3'-phosphate
  modified_base 6: mod_base = OTHER; note = 2'-fluorocytidine-3'-phosphate
  modified_base 7: mod_base = OTHER; note = 2'-O-methylcytidine-3'-phosphate
  modified_base 8: mod_base = OTHER; note = 2'-fluoroadenosine-3'-phosphate
  modified_base 9: mod_base = OTHER; note = 2'-fluorouridine-3'-phosphate
  modified_base 10: mod_base = OTHER; note = 2'-O-methylcytidine-3'-phosphate
  modified_base 11: mod_base = OTHER; note = 2'-O-methyluridine-3'-phosphate
  modified_base 12: mod_base = OTHER; note = 2'-O-methyluridine-3'-phosphate
  modified_base 13: mod_base = OTHER; note = 2'-O-methylcytidine-3'-phosphate
  modified_base 14: mod_base = OTHER; note = 2'-fluorouridine-3'-phosphate
  modified_base 15: mod_base = OTHER; note = 2'-O-methylcytidine-3'-phosphate
  modified_base 16: mod_base = OTHER; note = 2'-fluorouridine-3'-phosphate
  modified_base 17: mod_base = OTHER; note = 2'-O-methylguanosine-3'-phosphate
  modified_base 18: mod_base = OTHER; note = 2'-O-methylcytidine-3'-phosphate
  modified_base 19: mod_base = OTHER; note = 2'-O-methylcytidine-3'-phosphate
  modified_base 20: mod_base = OTHER; note = 2'-O-methyluridine-3'-phosphate
  modified_base 21: mod_base = OTHER; note = 2'-O-methylguanosine-3'- phosphorothioate
  modified_base 22: mod_base = OTHER; note = 2'-O-methylcytidine-3'- phosphorothioate
  modified_base 23: mod_base = OTHER; note = 2'-O-methylcytidine-3'-phosphate
gtagcccatcttctctgcctgcc

SEQ ID NO: 2986-3209 - skipped (224 entries)

SEQ ID NO: 3210 - RNA, 21 nt, synthetic construct
  source 1..21: mol_type = other RNA
tttatctgatctgtgattaaa

SEQ ID NO: 3211 - RNA, 21 nt, synthetic construct
  source 1..21: mol_type = other RNA
actggttagtgtgaaatagtt

SEQ ID NO: 3212 - RNA, 21 nt, synthetic construct
  source 1..21: mol_type = other RNA
aacatgcctagtccaacattt

SEQ ID NO: 3213 - RNA, 21 nt, synthetic construct
  source 1..21: mol_type = other RNA
caagtccaatatggcaactct

SEQ ID NO: 3214 - RNA, 21 nt, synthetic construct
  source 1..21: mol_type = other RNA
tccaccatgattaagggtctt

SEQ ID NO: 3215 - RNA, 21 nt, synthetic construct
  source 1..21: mol_type = other RNA
tcatttcactgtctaggctaa

SEQ ID NO: 3216 - RNA, 21 nt, synthetic construct
  source 1..21: mol_type = other RNA
tgtcctttttatctgatctgt

SEQ ID NO: 3217 - RNA, 21 nt, synthetic construct
  source 1..21: mol_type = other RNA
ccagtgtataaatccaatata

SEQ ID NO: 3218 - RNA, 21 nt, synthetic construct
  source 1..21: mol_type = other RNA
tccaagtgttataccaactaa

SEQ ID NO: 3219 - RNA, 21 nt, synthetic construct
  source 1..21: mol_type = other RNA
gtcatcgaagacaaattgaaa

SEQ ID NO: 3220 - RNA, 21 nt, synthetic construct
  source 1..21: mol_type = other RNA
gaacaccaaagattgtctcta

SEQ ID NO: 3221 - RNA, 21 nt, synthetic construct
  source 1..21: mol_type = other RNA
aacaccaaagattgtctctga

SEQ ID NO: 3222 - RNA, 21 nt, synthetic construct
  source 1..21: mol_type = other RNA
atgttgtcctttttatctgat

SEQ ID NO: 3223 - RNA, 21 nt, synthetic construct
  source 1..21: mol_type = other RNA
tcaactcctgaagttagaaat

SEQ ID NO: 3224 - RNA, 21 nt, synthetic construct
  source 1..21: mol_type = other RNA
aactatccaagtgttatacca

SEQ ID NO: 3225 - RNA, 21 nt, synthetic construct
  source 1..21: mol_type = other RNA
tccttagaacaccaaagatta

SEQ ID NO: 3226 - RNA, 21 nt, synthetic construct
  source 1..21: mol_type = other RNA
ggtattaatcttgtgtagtct

SEQ ID NO: 3227 - RNA, 21 nt, synthetic construct
  source 1..21: mol_type = other RNA
ggctccttcactgaacatgca

SEQ ID NO: 3228 - RNA, 21 nt, synthetic construct
  source 1..21: mol_type = other RNA
tatcagtagtgtacattacca

SEQ ID NO: 3229 - RNA, 21 nt, synthetic construct
  source 1..21: mol_type = other RNA
cagccttttccttagaacaca

SEQ ID NO: 3230 - RNA, 21 nt, synthetic construct
  source 1..21: mol_type = other RNA
ctggttagtgtgaaatagtta

SEQ ID NO: 3231 - RNA, 21 nt, synthetic construct
  source 1..21: mol_type = other RNA
actatatcagtagtgtacatt

SEQ ID NO: 3232 - RNA, 21 nt, synthetic construct
  source 1..21: mol_type = other RNA
tatatcagtagtgtacattaa

SEQ ID NO: 3233 - RNA, 21 nt, synthetic construct
  source 1..21: mol_type = other RNA
gtaatattttaagatggacta

SEQ ID NO: 3234 - RNA, 21 nt, synthetic construct
  source 1..21: mol_type = other RNA
ttttaagatggactgggaaaa

SEQ ID NO: 3235 - RNA, 21 nt, synthetic construct
  source 1..21: mol_type = other RNA
tggttagtgtgaaatagttct

SEQ ID NO: 3236 - RNA, 21 nt, synthetic construct
  source 1..21: mol_type = other RNA
ttcactgaacatgcctagtca

SEQ ID NO: 3237 - RNA, 21 nt, synthetic construct
  source 1..21: mol_type = other RNA
accaactatccaagtgttata

SEQ ID NO: 3238 - RNA, 21 nt, synthetic construct
  source 1..21: mol_type = other RNA
ccaagtgttataccaactaaa

SEQ ID NO: 3239 - RNA, 21 nt, synthetic construct
  source 1..21: mol_type = other RNA
ttccttttggttccaagtcca

SEQ ID NO: 3240 - RNA, 21 nt, synthetic construct
  source 1..21: mol_type = other RNA
gcagccttttccttagaacaa

SEQ ID NO: 3241 - RNA, 21 nt, synthetic construct
  source 1..21: mol_type = other RNA
agtaatattttaagatggact

SEQ ID NO: 3242 - RNA, 21 nt, synthetic construct
  source 1..21: mol_type = other RNA
aaaatccacagctatatccta

SEQ ID NO: 3243 - RNA, 21 nt, synthetic construct
  source 1..21: mol_type = other RNA
tccttcactgaacatgcctaa

SEQ ID NO: 3244 - RNA, 21 nt, synthetic construct
  source 1..21: mol_type = other RNA
cactgaacatgcctagtccaa

SEQ ID NO: 3245 - RNA, 21 nt, synthetic construct
  source 1..21: mol_type = other RNA
aagtgttataccaactaaaac

SEQ ID NO: 3246 - RNA, 21 nt, synthetic construct
  source 1..21: mol_type = other RNA
ttccaccatgattaagggtct

SEQ ID NO: 3247 - RNA, 21 nt, synthetic construct
  source 1..21: mol_type = other RNA
gaacatgcctagtccaacatt

SEQ ID NO: 3248 - RNA, 21 nt, synthetic construct
  source 1..21: mol_type = other RNA
atcagtagtgtacattaccat

SEQ ID NO: 3249 - RNA, 21 nt, synthetic construct
  source 1..21: mol_type = other RNA
atccaagtgttataccaacta

SEQ ID NO: 3250 - RNA, 21 nt, synthetic construct
  source 1..21: mol_type = other RNA
ccaagtccaatatggcaacta

SEQ ID NO: 3251 - RNA, 21 nt, synthetic construct
  source 1..21: mol_type = other RNA
atctcagaccttgtgaaggta

SEQ ID NO: 3252 - RNA, 21 nt, synthetic construct
  source 1..21: mol_type = other RNA
catttcactgtctaggctaca

SEQ ID NO: 3253 - RNA, 21 nt, synthetic construct
  source 1..21: mol_type = other RNA
ccacagctatatcctgatgct

SEQ ID NO: 3254 - RNA, 21 nt, synthetic construct
  source 1..21: mol_type = other RNA
cttcactgaacatgcctagta

SEQ ID NO: 3255 - RNA, 21 nt, synthetic construct
  source 1..21: mol_type = other RNA
gtggttgagagtgcttatgaa

SEQ ID NO: 3256 - RNA, 21 nt, synthetic construct
  source 1..21: mol_type = other RNA
caaactcaaaggctacacata

SEQ ID NO: 3257 - RNA, 21 nt, synthetic construct
  source 1..21: mol_type = other RNA
atatcagtagtgtacattaca

SEQ ID NO: 3258 - RNA, 21 nt, synthetic construct
  source 1..21: mol_type = other RNA
caaccaactatccaagtgtta

SEQ ID NO: 3259 - RNA, 21 nt, synthetic construct
  source 1..21: mol_type = other RNA
tcatcgaagacaaattgaaga

SEQ ID NO: 3260 - RNA, 21 nt, synthetic construct
  source 1..21: mol_type = other RNA
gcagatttggcagagagtata

SEQ ID NO: 3261 - RNA, 21 nt, synthetic construct
  source 1..21: mol_type = other RNA
ctccttcactgaacatgccta

SEQ ID NO: 3262 - RNA, 21 nt, synthetic construct
  source 1..21: mol_type = other RNA
catgcctagtccaacattttt

SEQ ID NO: 3263 - RNA, 21 nt, synthetic construct
  source 1..21: mol_type = other RNA
tgccatcagtatcttaatgaa

SEQ ID NO: 3264 - RNA, 21 nt, synthetic construct
  source 1..21: mol_type = other RNA
gccatcagtatcttaatgaaa

SEQ ID NO: 3265 - RNA, 21 nt, synthetic construct
  source 1..21: mol_type = other RNA
ttagaacaccaaagattgtct

SEQ ID NO: 3266 - RNA, 21 nt, synthetic construct
  source 1..21: mol_type = other RNA
atcatttcactgtctaggcta

SEQ ID NO: 3267 - RNA, 21 nt, synthetic construct
  source 1..21: mol_type = other RNA
tcactgtctaggctacaacaa

SEQ ID NO: 3268 - RNA, 21 nt, synthetic construct
  source 1..21: mol_type = other RNA
ggatccagtgtataaatccaa

SEQ ID NO: 3269 - RNA, 21 nt, synthetic construct
  source 1..21: mol_type = other RNA
caactatccaagtgttataca

SEQ ID NO: 3270 - RNA, 21 nt, synthetic construct
  source 1..21: mol_type = other RNA
ttggttccaagtccaatatga

SEQ ID NO: 3271 - RNA, 21 nt, synthetic construct
  source 1..21: mol_type = other RNA
tgcttatgaggtgatcaaact

SEQ ID NO: 3272 - RNA, 21 nt, synthetic construct
  source 1..21: mol_type = other RNA
aaactcaaaggctacacatca

SEQ ID NO: 3273 - RNA, 21 nt, synthetic construct
  source 1..21: mol_type = other RNA
tctcagaccttgtgaaggtga

SEQ ID NO: 3274 - RNA, 21 nt, synthetic construct
  source 1..21: mol_type = other RNA
taaaatccacagctatatcct

SEQ ID NO: 3275 - RNA, 21 nt, synthetic construct
  source 1..21: mol_type = other RNA
ccttcactgaacatgcctagt

SEQ ID NO: 3276 - RNA, 21 nt, synthetic construct
  source 1..21: mol_type = other RNA
gggatccagtgtataaatcca

SEQ ID NO: 3277 - RNA, 21 nt, synthetic construct
  source 1..21: mol_type = other RNA
caataaaccttgaacagtgaa

SEQ ID NO: 3278 - RNA, 21 nt, synthetic construct
  source 1..21: mol_type = other RNA
ggcctgtgccatcagtatctt

SEQ ID NO: 3279 - RNA, 21 nt, synthetic construct
  source 1..21: mol_type = other RNA
ttgttgatgtcatcgaagaca

SEQ ID NO: 3280 - RNA, 21 nt, synthetic construct
  source 1..21: mol_type = other RNA
ggatcttattttgtgaactat

SEQ ID NO: 3281 - RNA, 21 nt, synthetic construct
  source 1..21: mol_type = other RNA
aaggatcttattttgtgaact

SEQ ID NO: 3282 - RNA, 21 nt, synthetic construct
  source 1..21: mol_type = other RNA
atcatgtcttgtgcataatta

SEQ ID NO: 3283 - RNA, 21 nt, synthetic construct
  source 1..21: mol_type = other RNA
tgtcatatcatttcactgtct

SEQ ID NO: 3284 - RNA, 21 nt, synthetic construct
  source 1..21: mol_type = other RNA
tcatatcatttcactgtctaa

SEQ ID NO: 3285 - RNA, 21 nt, synthetic construct
  source 1..21: mol_type = other RNA
atttataatcttctaaaggaa

SEQ ID NO: 3286 - RNA, 21 nt, synthetic construct
  source 1..21: mol_type = other RNA
tggtttgtaaaatccacagct

SEQ ID NO: 3287 - RNA, 21 nt, synthetic construct
  source 1..21: mol_type = other RNA
atgctggatggtattaatctt

SEQ ID NO: 3288 - RNA, 21 nt, synthetic construct
  source 1..21: mol_type = other RNA
aactatatcagtagtgtacat

SEQ ID NO: 3289 - RNA, 21 nt, synthetic construct
  source 1..21: mol_type = other RNA
atcaactcctgaagttagaaa

SEQ ID NO: 3290 - RNA, 21 nt, synthetic construct
  source 1..21: mol_type = other RNA
ctggatggtattaatcttgta

SEQ ID NO: 3291 - RNA, 21 nt, synthetic construct
  source 1..21: mol_type = other RNA
tatcatttcactgtctaggct

SEQ ID NO: 3292 - RNA, 21 nt, synthetic construct
  source 1..21: mol_type = other RNA
gtaaaatccacagctatatca

SEQ ID NO: 3293 - RNA, 21 nt, synthetic construct
  source 1..21: mol_type = other RNA
tccttagtgttccttgcattt

SEQ ID NO: 3294 - RNA, 21 nt, synthetic construct
  source 1..21: mol_type = other RNA
catatcatttcactgtctaga

SEQ ID NO: 3295 - RNA, 21 nt, synthetic construct
  source 1..21: mol_type = other RNA
aacatcaactcctgaagttaa

SEQ ID NO: 3296 - RNA, 21 nt, synthetic construct
  source 1..21: mol_type = other RNA
cctgatgctggatggtattaa

SEQ ID NO: 3297 - RNA, 21 nt, synthetic construct
  source 1..21: mol_type = other RNA
aatgcaaccaactatccaagt

SEQ ID NO: 3298 - RNA, 21 nt, synthetic construct
  source 1..21: mol_type = other RNA
tttacggaataaaggatgata

SEQ ID NO: 3299 - RNA, 21 nt, synthetic construct
  source 1..21: mol_type = other RNA
ttccttagtgttccttgcatt

SEQ ID NO: 3300 - RNA, 21 nt, synthetic construct
  source 1..21: mol_type = other RNA
caatgcaaccaactatccaaa

SEQ ID NO: 3301 - RNA, 21 nt, synthetic construct
  source 1..21: mol_type = other RNA
agatttggcagagagtataat

SEQ ID NO: 3302 - RNA, 21 nt, synthetic construct
  source 1..21: mol_type = other RNA
tttccaccatgattaagggta

SEQ ID NO: 3303 - RNA, 21 nt, synthetic construct
  source 1..21: mol_type = other RNA
actggttagtgtgaaatagtt

SEQ ID NO: 3304 - RNA, 21 nt, synthetic construct
  source 1..21: mol_type = other RNA
caagtccaatatggcaactct

SEQ ID NO: 3305 - RNA, 21 nt, synthetic construct
  source 1..21: mol_type = other RNA
tccaccatgattaagggtctt

SEQ ID NO: 3306 - RNA, 21 nt, synthetic construct
  source 1..21: mol_type = other RNA
tcatttcactgtctaggctaa

SEQ ID NO: 3307 - RNA, 21 nt, synthetic construct
  source 1..21: mol_type = other RNA
tgtcctttttatctgatctgt

SEQ ID NO: 3308 - RNA, 21 nt, synthetic construct
  source 1..21: mol_type = other RNA
ccagtgtataaatccaatata

SEQ ID NO: 3309 - RNA, 21 nt, synthetic construct
  source 1..21: mol_type = other RNA
tccaagtgttataccaactaa

SEQ ID NO: 3310 - RNA, 21 nt, synthetic construct
  source 1..21: mol_type = other RNA
gaacaccaaagattgtctcta

SEQ ID NO: 3311 - RNA, 21 nt, synthetic construct
  source 1..21: mol_type = other RNA
aacaccaaagattgtctctga

SEQ ID NO: 3312 - RNA, 21 nt, synthetic construct
  source 1..21: mol_type = other RNA
atgttgtcctttttatctgat

SEQ ID NO: 3313 - RNA, 21 nt, synthetic construct
  source 1..21: mol_type = other RNA
tcaactcctgaagttagaaat

SEQ ID NO: 3314 - RNA, 21 nt, synthetic construct
  source 1..21: mol_type = other RNA
aactatccaagtgttatacca

SEQ ID NO: 3315 - RNA, 21 nt, synthetic construct
  source 1..21: mol_type = other RNA
ggtattaatcttgtgtagtct

SEQ ID NO: 3316 - RNA, 21 nt, synthetic construct
  source 1..21: mol_type = other RNA
ggctccttcactgaacatgca

SEQ ID NO: 3317 - RNA, 21 nt, synthetic construct
  source 1..21: mol_type = other RNA
tatcagtagtgtacattacca

SEQ ID NO: 3318 - RNA, 21 nt, synthetic construct
  source 1..21: mol_type = other RNA
cagccttttccttagaacaca

SEQ ID NO: 3319 - RNA, 21 nt, synthetic construct
  source 1..21: mol_type = other RNA
ctggttagtgtgaaatagtta

SEQ ID NO: 3320 - RNA, 21 nt, synthetic construct
  source 1..21: mol_type = other RNA
actatatcagtagtgtacatt

SEQ ID NO: 3321 - RNA, 21 nt, synthetic construct
  source 1..21: mol_type = other RNA
tatatcagtagtgtacattaa

SEQ ID NO: 3322 - RNA, 21 nt, synthetic construct
  source 1..21: mol_type = other RNA
gtaatattttaagatggacta

SEQ ID NO: 3323 - RNA, 21 nt, synthetic construct
  source 1..21: mol_type = other RNA
ttttaagatggactgggaaaa

SEQ ID NO: 3324 - RNA, 21 nt, synthetic construct
  source 1..21: mol_type = other RNA
ttcactgaacatgcctagtca

SEQ ID NO: 3325 - RNA, 21 nt, synthetic construct
  source 1..21: mol_type = other RNA
accaactatccaagtgttata

SEQ ID NO: 3326 - RNA, 21 nt, synthetic construct
  source 1..21: mol_type = other RNA
ccaagtgttataccaactaaa

SEQ ID NO: 3327 - RNA, 21 nt, synthetic construct
  source 1..21: mol_type = other RNA
agtaatattttaagatggact

SEQ ID NO: 3328 - RNA, 21 nt, synthetic construct
  source 1..21: mol_type = other RNA
aaaatccacagctatatccta

SEQ ID NO: 3329 - RNA, 21 nt, synthetic construct
  source 1..21: mol_type = other RNA
tccttcactgaacatgcctaa

SEQ ID NO: 3330 - RNA, 21 nt, synthetic construct
  source 1..21: mol_type = other RNA
cactgaacatgcctagtccaa

SEQ ID NO: 3331 - RNA, 21 nt, synthetic construct
  source 1..21: mol_type = other RNA
aagtgttataccaactaaaac

SEQ ID NO: 3332 - RNA, 21 nt, synthetic construct
  source 1..21: mol_type = other RNA
ttccaccatgattaagggtct

SEQ ID NO: 3333 - RNA, 21 nt, synthetic construct
  source 1..21: mol_type = other RNA
gaacatgcctagtccaacatt

SEQ ID NO: 3334 - RNA, 21 nt, synthetic construct
  source 1..21: mol_type = other RNA
atcagtagtgtacattaccat

SEQ ID NO: 3335 - RNA, 21 nt, synthetic construct
  source 1..21: mol_type = other RNA
atccaagtgttataccaacta

SEQ ID NO: 3336 - RNA, 21 nt, synthetic construct
  source 1..21: mol_type = other RNA
ccaagtccaatatggcaacta

SEQ ID NO: 3337 - RNA, 21 nt, synthetic construct
  source 1..21: mol_type = other RNA
catttcactgtctaggctaca

SEQ ID NO: 3338 - RNA, 21 nt, synthetic construct
  source 1..21: mol_type = other RNA
ccacagctatatcctgatgct

SEQ ID NO: 3339 - RNA, 21 nt, synthetic construct
  source 1..21: mol_type = other RNA
cttcactgaacatgcctagta

SEQ ID NO: 3340 - RNA, 21 nt, synthetic construct
  source 1..21: mol_type = other RNA
gtggttgagagtgcttatgaa

SEQ ID NO: 3341 - RNA, 21 nt, synthetic construct
  source 1..21: mol_type = other RNA
atatcagtagtgtacattaca

SEQ ID NO: 3342 - RNA, 21 nt, synthetic construct
  source 1..21: mol_type = other RNA
caaccaactatccaagtgtta

SEQ ID NO: 3343 - RNA, 21 nt, synthetic construct
  source 1..21: mol_type = other RNA
gcagatttggcagagagtata

SEQ ID NO: 3344 - RNA, 21 nt, synthetic construct
  source 1..21: mol_type = other RNA
ctccttcactgaacatgccta

SEQ ID NO: 3345 - RNA, 21 nt, synthetic construct
  source 1..21: mol_type = other RNA
catgcctagtccaacattttt

SEQ ID NO: 3346 - RNA, 21 nt, synthetic construct
  source 1..21: mol_type = other RNA
tgccatcagtatcttaatgaa

SEQ ID NO: 3347 - RNA, 21 nt, synthetic construct
  source 1..21: mol_type = other RNA
gccatcagtatcttaatgaaa

SEQ ID NO: 3348 - RNA, 21 nt, synthetic construct
  source 1..21: mol_type = other RNA
ttagaacaccaaagattgtct

SEQ ID NO: 3349 - RNA, 21 nt, synthetic construct
  source 1..21: mol_type = other RNA
atcatttcactgtctaggcta

SEQ ID NO: 3350 - RNA, 21 nt, synthetic construct
  source 1..21: mol_type = other RNA
tcactgtctaggctacaacaa

SEQ ID NO: 3351 - RNA, 21 nt, synthetic construct
  source 1..21: mol_type = other RNA
caactatccaagtgttataca

SEQ ID NO: 3352 - RNA, 21 nt, synthetic construct
  source 1..21: mol_type = other RNA
ttggttccaagtccaatatga

SEQ ID NO: 3353 - RNA, 21 nt, synthetic construct
  source 1..21: mol_type = other RNA
tgcttatgaggtgatcaaact

SEQ ID NO: 3354 - RNA, 21 nt, synthetic construct
  source 1..21: mol_type = other RNA
tctcagaccttgtgaaggtga

SEQ ID NO: 3355 - RNA, 21 nt, synthetic construct
  source 1..21: mol_type = other RNA
taaaatccacagctatatcct

SEQ ID NO: 3356 - RNA, 21 nt, synthetic construct
  source 1..21: mol_type = other RNA
ccttcactgaacatgcctagt

SEQ ID NO: 3357 - RNA, 21 nt, synthetic construct
  source 1..21: mol_type = other RNA
gggatccagtgtataaatcca

SEQ ID NO: 3358 - RNA, 21 nt, synthetic construct
  source 1..21: mol_type = other RNA
caataaaccttgaacagtgaa

SEQ ID NO: 3359 - RNA, 21 nt, synthetic construct
  source 1..21: mol_type = other RNA
ggcctgtgccatcagtatctt

SEQ ID NO: 3360 - RNA, 21 nt, synthetic construct
  source 1..21: mol_type = other RNA
ttgttgatgtcatcgaagaca

SEQ ID NO: 3361 - RNA, 21 nt, synthetic construct
  source 1..21: mol_type = other RNA
agatttggcagagagtataat

SEQ ID NO: 3362 - RNA, 21 nt, synthetic construct
  source 1..21: mol_type = other RNA
tttccaccatgattaagggta

SEQ ID NO: 3363 - RNA, 21 nt, synthetic construct
  source 1..21: mol_type = other RNA
ctaggctacaacaggattcta

SEQ ID NO: 3364 - RNA, 21 nt, synthetic construct
  source 1..21: mol_type = other RNA
tggaggttgtgcatgttgtca

SEQ ID NO: 3365 - RNA, 21 nt, synthetic construct
  source 1..21: mol_type = other RNA
gctccttcactgaacatgcct

SEQ ID NO: 3366 - RNA, 21 nt, synthetic construct
  source 1..21: mol_type = other RNA
cttttggttccaagtccaata

SEQ ID NO: 3367 - RNA, 21 nt, synthetic construct
  source 1..21: mol_type = other RNA
gcctgtgccatcagtatctta

SEQ ID NO: 3368 - RNA, 21 nt, synthetic construct
  source 1..21: mol_type = other RNA
gcttatgaggtgatcaaacta

SEQ ID NO: 3369 - RNA, 21 nt, synthetic construct
  source 1..21: mol_type = other RNA
cttatgaggtgatcaaactca

SEQ ID NO: 3370 - RNA, 21 nt, synthetic construct
  source 1..21: mol_type = other RNA
ccttgcattttgggacagaat

SEQ ID NO: 3371 - RNA, 21 nt, synthetic construct
  source 1..21: mol_type = other RNA
ggttccaagtccaatatggca

SEQ ID NO: 3372 - RNA, 21 nt, synthetic construct
  source 1..21: mol_type = other RNA
cactgtctaggctacaacaga

SEQ ID NO: 3373 - RNA, 21 nt, synthetic construct
  source 1..21: mol_type = other RNA
actgtctaggctacaacagga

SEQ ID NO: 3374 - RNA, 21 nt, synthetic construct
  source 1..21: mol_type = other RNA
aataagattacagttgttgga

SEQ ID NO: 3375 - RNA, 21 nt, synthetic construct
  source 1..21: mol_type = other RNA
gttgagagtgcttatgaggta

SEQ ID NO: 3376 - RNA, 21 nt, synthetic construct
  source 1..21: mol_type = other RNA
gtctaggctacaacaggatta

SEQ ID NO: 3377 - RNA, 21 nt, synthetic construct
  source 1..21: mol_type = other RNA
tctaggctacaacaggattct

SEQ ID NO: 3378 - RNA, 21 nt, synthetic construct
  source 1..21: mol_type = other RNA
gtggaggttgtgcatgttgta

SEQ ID NO: 3379 - RNA, 21 nt, synthetic construct
  source 1..21: mol_type = other RNA
tgaggtgatcaaactcaaaga

SEQ ID NO: 3380 - RNA, 21 nt, synthetic construct
  source 1..21: mol_type = other RNA
gtgatcaaactcaaaggctaa

SEQ ID NO: 3381 - RNA, 21 nt, synthetic construct
  source 1..21: mol_type = other RNA
tgaggaagaggcccgtttgaa

SEQ ID NO: 3382 - RNA, 21 nt, synthetic construct
  source 1..21: mol_type = other RNA
acaagcaggtggttgagagta

SEQ ID NO: 3383 - RNA, 21 nt, synthetic construct
  source 1..21: mol_type = other RNA
cagatttggcagagagtataa

SEQ ID NO: 3384 - RNA, 21 nt, synthetic construct
  source 1..21: mol_type = other RNA
gtgcttatgaggtgatcaaac

SEQ ID NO: 3385 - RNA, 21 nt, synthetic construct
  source 1..21: mol_type = other RNA
agcagatttggcagagagtat

SEQ ID NO: 3386 - RNA, 21 nt, synthetic construct
  source 1..21: mol_type = other RNA
atttggcagagagtataatga

SEQ ID NO: 3387 - RNA, 21 nt, synthetic construct
  source 1..21: mol_type = other RNA
tttggcagagagtataatgaa

SEQ ID NO: 3388 - RNA, 21 nt, synthetic construct
  source 1..21: mol_type = other RNA
cttgcattttgggacagaata

SEQ ID NO: 3389 - RNA, 21 nt, synthetic construct
  source 1..21: mol_type = other RNA
atggaatctcagaccttgtga

SEQ ID NO: 3390 - RNA, 21 nt, synthetic construct
  source 1..21: mol_type = other RNA
cacagctatatcctgatgcta

SEQ ID NO: 3391 - RNA, 21 nt, synthetic construct
  source 1..21: mol_type = other RNA
gaggaagaggcccgtttgaaa

SEQ ID NO: 3392 - RNA, 21 nt, synthetic construct
  source 1..21: mol_type = other RNA
tctgaggaagaggcccgttta

SEQ ID NO: 3393 - RNA, 21 nt, synthetic construct
  source 1..21: mol_type = other RNA
cacatcctgggatccagtgta

SEQ ID NO: 3394 - RNA, 21 nt, synthetic construct
  source 1..21: mol_type = other RNA
agccttttccttagaacacca

SEQ ID NO: 3395 - RNA, 21 nt, synthetic construct
  source 1..21: mol_type = other RNA
tcaactggttagtgtgaaata

SEQ ID NO: 3396 - RNA, 23 nt, synthetic construct
  source 1..23: mol_type = other RNA
tttaatcacagatcagataaaaa

SEQ ID NO: 3397 - RNA, 23 nt, synthetic construct
  source 1..23: mol_type = other RNA
aactatttcacactaaccagttg

SEQ ID NO: 3398 - RNA, 23 nt, synthetic construct
  source 1..23: mol_type = other RNA
aaatgttggactaggcatgttca

SEQ ID NO: 3399 - RNA, 23 nt, synthetic construct
  source 1..23: mol_type = other RNA
agagttgccatattggacttgga

SEQ ID NO: 3400 - RNA, 23 nt, synthetic construct
  source 1..23: mol_type = other RNA
aagacccttaatcatggtggaaa

SEQ ID NO: 3401 - RNA, 23 nt, synthetic construct
  source 1..23: mol_type = other RNA
ttagcctagacagtgaaatgata

SEQ ID NO: 3402 - RNA, 23 nt, synthetic construct
  source 1..23: mol_type = other RNA
acagatcagataaaaaggacaac

SEQ ID NO: 3403 - RNA, 23 nt, synthetic construct
  source 1..23: mol_type = other RNA
tatattggatttatacactggat

SEQ ID NO: 3404 - RNA, 23 nt, synthetic construct
  source 1..23: mol_type = other RNA
ttagttggtataacacttggata

SEQ ID NO: 3405 - RNA, 23 nt, synthetic construct
  source 1..23: mol_type = other RNA
tttcaatttgtcttcgatgacat

SEQ ID NO: 3406 - RNA, 23 nt, synthetic construct
  source 1..23: mol_type = other RNA
tagagacaatctttggtgttcta

SEQ ID NO: 3407 - RNA, 23 nt, synthetic construct
  source 1..23: mol_type = other RNA
tcagagacaatctttggtgttct

SEQ ID NO: 3408 - RNA, 23 nt, synthetic construct
  source 1..23: mol_type = other RNA
atcagataaaaaggacaacatgc

SEQ ID NO: 3409 - RNA, 23 nt, synthetic construct
  source 1..23: mol_type = other RNA
atttctaacttcaggagttgatg

SEQ ID NO: 3410 - RNA, 23 nt, synthetic construct
  source 1..23: mol_type = other RNA
tggtataacacttggatagttgg

SEQ ID NO: 3411 - RNA, 23 nt, synthetic construct
  source 1..23: mol_type = other RNA
taatctttggtgttctaaggaaa

SEQ ID NO: 3412 - RNA, 23 nt, synthetic construct
  source 1..23: mol_type = other RNA
agactacacaagattaataccat

SEQ ID NO: 3413 - RNA, 23 nt, synthetic construct
  source 1..23: mol_type = other RNA
tgcatgttcagtgaaggagccag

SEQ ID NO: 3414 - RNA, 23 nt, synthetic construct
  source 1..23: mol_type = other RNA
tggtaatgtacactactgatata

SEQ ID NO: 3415 - RNA, 23 nt, synthetic construct
  source 1..23: mol_type = other RNA
tgtgttctaaggaaaaggctgcc

SEQ ID NO: 3416 - RNA, 23 nt, synthetic construct
  source 1..23: mol_type = other RNA
taactatttcacactaaccagtt

SEQ ID NO: 3417 - RNA, 23 nt, synthetic construct
  source 1..23: mol_type = other RNA
aatgtacactactgatatagttc

SEQ ID NO: 3418 - RNA, 23 nt, synthetic construct
  source 1..23: mol_type = other RNA
ttaatgtacactactgatatagt

SEQ ID NO: 3419 - RNA, 23 nt, synthetic construct
  source 1..23: mol_type = other RNA
tagtccatcttaaaatattactg

SEQ ID NO: 3420 - RNA, 23 nt, synthetic construct
  source 1..23: mol_type = other RNA
ttttcccagtccatcttaaaata

SEQ ID NO: 3421 - RNA, 23 nt, synthetic construct
  source 1..23: mol_type = other RNA
agaactatttcacactaaccagt

SEQ ID NO: 3422 - RNA, 23 nt, synthetic construct
  source 1..23: mol_type = other RNA
tgactaggcatgttcagtgaagg

SEQ ID NO: 3423 - RNA, 23 nt, synthetic construct
  source 1..23: mol_type = other RNA
tataacacttggatagttggttg

SEQ ID NO: 3424 - RNA, 23 nt, synthetic construct
  source 1..23: mol_type = other RNA
tttagttggtataacacttggat

SEQ ID NO: 3425 - RNA, 23 nt, synthetic construct
  source 1..23: mol_type = other RNA
tggacttggaaccaaaaggaatc

SEQ ID NO: 3426 - RNA, 23 nt, synthetic construct
  source 1..23: mol_type = other RNA
ttgttctaaggaaaaggctgcca

SEQ ID NO: 3427 - RNA, 23 nt, synthetic construct
  source 1..23: mol_type = other RNA
agtccatcttaaaatattactgc

SEQ ID NO: 3428 - RNA, 23 nt, synthetic construct
  source 1..23: mol_type = other RNA
taggatatagctgtggattttac

SEQ ID NO: 3429 - RNA, 23 nt, synthetic construct
  source 1..23: mol_type = other RNA
ttaggcatgttcagtgaaggagc

SEQ ID NO: 3430 - RNA, 23 nt, synthetic construct
  source 1..23: mol_type = other RNA
ttggactaggcatgttcagtgaa

SEQ ID NO: 3431 - RNA, 23 nt, synthetic construct
  source 1..23: mol_type = other RNA
gttttagttggtataacacttgg

SEQ ID NO: 3432 - RNA, 23 nt, synthetic construct
  source 1..23: mol_type = other RNA
agacccttaatcatggtggaaac

SEQ ID NO: 3433 - RNA, 23 nt, synthetic construct
  source 1..23: mol_type = other RNA
aatgttggactaggcatgttcag

SEQ ID NO: 3434 - RNA, 23 nt, synthetic construct
  source 1..23: mol_type = other RNA
atggtaatgtacactactgatat

SEQ ID NO: 3435 - RNA, 23 nt, synthetic construct
  source 1..23: mol_type = other RNA
tagttggtataacacttggatag

SEQ ID NO: 3436 - RNA, 23 nt, synthetic construct
  source 1..23: mol_type = other RNA
tagttgccatattggacttggaa

SEQ ID NO: 3437 - RNA, 23 nt, synthetic construct
  source 1..23: mol_type = other RNA
taccttcacaaggtctgagattc

SEQ ID NO: 3438 - RNA, 23 nt, synthetic construct
  source 1..23: mol_type = other RNA
tgtagcctagacagtgaaatgat

SEQ ID NO: 3439 - RNA, 23 nt, synthetic construct
  source 1..23: mol_type = other RNA
agcatcaggatatagctgtggat

SEQ ID NO: 3440 - RNA, 23 nt, synthetic construct
  source 1..23: mol_type = other RNA
tactaggcatgttcagtgaagga

SEQ ID NO: 3441 - RNA, 23 nt, synthetic construct
  source 1..23: mol_type = other RNA
ttcataagcactctcaaccacct

SEQ ID NO: 3442 - RNA, 23 nt, synthetic construct
  source 1..23: mol_type = other RNA
tatgtgtagcctttgagtttgat

SEQ ID NO: 3443 - RNA, 23 nt, synthetic construct
  source 1..23: mol_type = other RNA
tgtaatgtacactactgatatag

SEQ ID NO: 3444 - RNA, 23 nt, synthetic construct
  source 1..23: mol_type = other RNA
taacacttggatagttggttgca

SEQ ID NO: 3445 - RNA, 23 nt, synthetic construct
  source 1..23: mol_type = other RNA
tcttcaatttgtcttcgatgaca

SEQ ID NO: 3446 - RNA, 23 nt, synthetic construct
  source 1..23: mol_type = other RNA
tatactctctgccaaatctgcta

SEQ ID NO: 3447 - RNA, 23 nt, synthetic construct
  source 1..23: mol_type = other RNA
taggcatgttcagtgaaggagcc

SEQ ID NO: 3448 - RNA, 23 nt, synthetic construct
  source 1..23: mol_type = other RNA
aaaaatgttggactaggcatgtt

SEQ ID NO: 3449 - RNA, 23 nt, synthetic construct
  source 1..23: mol_type = other RNA
ttcattaagatactgatggcaca

SEQ ID NO: 3450 - RNA, 23 nt, synthetic construct
  source 1..23: mol_type = other RNA
tttcattaagatactgatggcac

SEQ ID NO: 3451 - RNA, 23 nt, synthetic construct
  source 1..23: mol_type = other RNA
agacaatctttggtgttctaagg

SEQ ID NO: 3452 - RNA, 23 nt, synthetic construct
  source 1..23: mol_type = other RNA
tagcctagacagtgaaatgatat

SEQ ID NO: 3453 - RNA, 23 nt, synthetic construct
  source 1..23: mol_type = other RNA
ttgttgtagcctagacagtgaaa

SEQ ID NO: 3454 - RNA, 23 nt, synthetic construct
  source 1..23: mol_type = other RNA
ttggatttatacactggatccca

SEQ ID NO: 3455 - RNA, 23 nt, synthetic construct
  source 1..23: mol_type = other RNA
tgtataacacttggatagttggt

SEQ ID NO: 3456 - RNA, 23 nt, synthetic construct
  source 1..23: mol_type = other RNA
tcatattggacttggaaccaaaa

SEQ ID NO: 3457 - RNA, 23 nt, synthetic construct
  source 1..23: mol_type = other RNA
agtttgatcacctcataagcact

SEQ ID NO: 3458 - RNA, 23 nt, synthetic construct
  source 1..23: mol_type = other RNA
tgatgtgtagcctttgagtttga

SEQ ID NO: 3459 - RNA, 23 nt, synthetic construct
  source 1..23: mol_type = other RNA
tcaccttcacaaggtctgagatt

SEQ ID NO: 3460 - RNA, 23 nt, synthetic construct
  source 1..23: mol_type = other RNA
aggatatagctgtggattttaca

SEQ ID NO: 3461 - RNA, 23 nt, synthetic construct
  source 1..23: mol_type = other RNA
actaggcatgttcagtgaaggag

SEQ ID NO: 3462 - RNA, 23 nt, synthetic construct
  source 1..23: mol_type = other RNA
tggatttatacactggatcccag

SEQ ID NO: 3463 - RNA, 23 nt, synthetic construct
  source 1..23: mol_type = other RNA
ttcactgttcaaggtttattggg

SEQ ID NO: 3464 - RNA, 23 nt, synthetic construct
  source 1..23: mol_type = other RNA
aagatactgatggcacaggccat

SEQ ID NO: 3465 - RNA, 23 nt, synthetic construct
  source 1..23: mol_type = other RNA
tgtcttcgatgacatcaacaaga

SEQ ID NO: 3466 - RNA, 23 nt, synthetic construct
  source 1..23: mol_type = other RNA
atagttcacaaaataagatcctt

SEQ ID NO: 3467 - RNA, 23 nt, synthetic construct
  source 1..23: mol_type = other RNA
agttcacaaaataagatcctttg

SEQ ID NO: 3468 - RNA, 23 nt, synthetic construct
  source 1..23: mol_type = other RNA
taattatgcacaagacatgatat

SEQ ID NO: 3469 - RNA, 23 nt, synthetic construct
  source 1..23: mol_type = other RNA
agacagtgaaatgatatgacatc

SEQ ID NO: 3470 - RNA, 23 nt, synthetic construct
  source 1..23: mol_type = other RNA
ttagacagtgaaatgatatgaca

SEQ ID NO: 3471 - RNA, 23 nt, synthetic construct
  source 1..23: mol_type = other RNA
ttcctttagaagattataaatca

SEQ ID NO: 3472 - RNA, 23 nt, synthetic construct
  source 1..23: mol_type = other RNA
agctgtggattttacaaaccatt

SEQ ID NO: 3473 - RNA, 23 nt, synthetic construct
  source 1..23: mol_type = other RNA
aagattaataccatccagcatca

SEQ ID NO: 3474 - RNA, 23 nt, synthetic construct
  source 1..23: mol_type = other RNA
atgtacactactgatatagttca

SEQ ID NO: 3475 - RNA, 23 nt, synthetic construct
  source 1..23: mol_type = other RNA
tttctaacttcaggagttgatgt

SEQ ID NO: 3476 - RNA, 23 nt, synthetic construct
  source 1..23: mol_type = other RNA
tacaagattaataccatccagca

SEQ ID NO: 3477 - RNA, 23 nt, synthetic construct
  source 1..23: mol_type = other RNA
agcctagacagtgaaatgatatg

SEQ ID NO: 3478 - RNA, 23 nt, synthetic construct
  source 1..23: mol_type = other RNA
tgatatagctgtggattttacaa

SEQ ID NO: 3479 - RNA, 23 nt, synthetic construct
  source 1..23: mol_type = other RNA
aaatgcaaggaacactaaggaag

SEQ ID NO: 3480 - RNA, 23 nt, synthetic construct
  source 1..23: mol_type = other RNA
tctagacagtgaaatgatatgac

SEQ ID NO: 3481 - RNA, 23 nt, synthetic construct
  source 1..23: mol_type = other RNA
ttaacttcaggagttgatgtttt

SEQ ID NO: 3482 - RNA, 23 nt, synthetic construct
  source 1..23: mol_type = other RNA
ttaataccatccagcatcaggat

SEQ ID NO: 3483 - RNA, 23 nt, synthetic construct
  source 1..23: mol_type = other RNA
acttggatagttggttgcattgt

SEQ ID NO: 3484 - RNA, 23 nt, synthetic construct
  source 1..23: mol_type = other RNA
tatcatcctttattccgtaaaga

SEQ ID NO: 3485 - RNA, 23 nt, synthetic construct
  source 1..23: mol_type = other RNA
aatgcaaggaacactaaggaaga

SEQ ID NO: 3486 - RNA, 23 nt, synthetic construct
  source 1..23: mol_type = other RNA
tttggatagttggttgcattgtt

SEQ ID NO: 3487 - RNA, 23 nt, synthetic construct
  source 1..23: mol_type = other RNA
attatactctctgccaaatctgc

SEQ ID NO: 3488 - RNA, 23 nt, synthetic construct
  source 1..23: mol_type = other RNA
tacccttaatcatggtggaaact

SEQ ID NO: 3489 - RNA, 23 nt, synthetic construct
  source 1..23: mol_type = other RNA
aactatttcacactaaccagttg

SEQ ID NO: 3490 - RNA, 23 nt, synthetic construct
  source 1..23: mol_type = other RNA
agagttgccatattggacttgga

SEQ ID NO: 3491 - RNA, 23 nt, synthetic construct
  source 1..23: mol_type = other RNA
aagacccttaatcatggtggaaa

SEQ ID NO: 3492 - RNA, 23 nt, synthetic construct
  source 1..23: mol_type = other RNA
ttagcctagacagtgaaatgata

SEQ ID NO: 3493 - RNA, 23 nt, synthetic construct
  source 1..23: mol_type = other RNA
acagatcagataaaaaggacaac

SEQ ID NO: 3494 - RNA, 23 nt, synthetic construct
  source 1..23: mol_type = other RNA
tatattggatttatacactggat

SEQ ID NO: 3495 - RNA, 23 nt, synthetic construct
  source 1..23: mol_type = other RNA
ttagttggtataacacttggata

SEQ ID NO: 3496 - RNA, 23 nt, synthetic construct
  source 1..23: mol_type = other RNA
tagagacaatctttggtgttcta

SEQ ID NO: 3497 - RNA, 23 nt, synthetic construct
  source 1..23: mol_type = other RNA
tcagagacaatctttggtgttct

SEQ ID NO: 3498 - RNA, 23 nt, synthetic construct
  source 1..23: mol_type = other RNA
atcagataaaaaggacaacatgc

SEQ ID NO: 3499 - RNA, 23 nt, synthetic construct
  source 1..23: mol_type = other RNA
atttctaacttcaggagttgatg

SEQ ID NO: 3500 - RNA, 23 nt, synthetic construct
  source 1..23: mol_type = other RNA
tggtataacacttggatagttgg

SEQ ID NO: 3501 - RNA, 23 nt, synthetic construct
  source 1..23: mol_type = other RNA
agactacacaagattaataccat

SEQ ID NO: 3502 - RNA, 23 nt, synthetic construct
  source 1..23: mol_type = other RNA
tgcatgttcagtgaaggagccag

SEQ ID NO: 3503 - RNA, 23 nt, synthetic construct
  source 1..23: mol_type = other RNA
tggtaatgtacactactgatata

SEQ ID NO: 3504 - RNA, 23 nt, synthetic construct
  source 1..23: mol_type = other RNA
tgtgttctaaggaaaaggctgcc

SEQ ID NO: 3505 - RNA, 23 nt, synthetic construct
  source 1..23: mol_type = other RNA
taactatttcacactaaccagtt

SEQ ID NO: 3506 - RNA, 23 nt, synthetic construct
  source 1..23: mol_type = other RNA
aatgtacactactgatatagttc

SEQ ID NO: 3507 - RNA, 23 nt, synthetic construct
  source 1..23: mol_type = other RNA
ttaatgtacactactgatatagt

SEQ ID NO: 3508 - RNA, 23 nt, synthetic construct
  source 1..23: mol_type = other RNA
tagtccatcttaaaatattactg

SEQ ID NO: 3509 - RNA, 23 nt, synthetic construct
  source 1..23: mol_type = other RNA
ttttcccagtccatcttaaaata

SEQ ID NO: 3510 - RNA, 23 nt, synthetic construct
  source 1..23: mol_type = other RNA
tgactaggcatgttcagtgaagg

SEQ ID NO: 3511 - RNA, 23 nt, synthetic construct
  source 1..23: mol_type = other RNA
tataacacttggatagttggttg

SEQ ID NO: 3512 - RNA, 23 nt, synthetic construct
  source 1..23: mol_type = other RNA
tttagttggtataacacttggat

SEQ ID NO: 3513 - RNA, 23 nt, synthetic construct
  source 1..23: mol_type = other RNA
agtccatcttaaaatattactgc

SEQ ID NO: 3514 - RNA, 23 nt, synthetic construct
  source 1..23: mol_type = other RNA
taggatatagctgtggattttac

SEQ ID NO: 3515 - RNA, 23 nt, synthetic construct
  source 1..23: mol_type = other RNA
ttaggcatgttcagtgaaggagc

SEQ ID NO: 3516 - RNA, 23 nt, synthetic construct
  source 1..23: mol_type = other RNA
ttggactaggcatgttcagtgaa

SEQ ID NO: 3517 - RNA, 23 nt, synthetic construct
  source 1..23: mol_type = other RNA
gttttagttggtataacacttgg

SEQ ID NO: 3518 - RNA, 23 nt, synthetic construct
  source 1..23: mol_type = other RNA
agacccttaatcatggtggaaac

SEQ ID NO: 3519 - RNA, 23 nt, synthetic construct
  source 1..23: mol_type = other RNA
aatgttggactaggcatgttcag

SEQ ID NO: 3520 - RNA, 23 nt, synthetic construct
  source 1..23: mol_type = other RNA
atggtaatgtacactactgatat

SEQ ID NO: 3521 - RNA, 23 nt, synthetic construct
  source 1..23: mol_type = other RNA
tagttggtataacacttggatag

SEQ ID NO: 3522 - RNA, 23 nt, synthetic construct
  source 1..23: mol_type = other RNA
tagttgccatattggacttggaa

SEQ ID NO: 3523 - RNA, 23 nt, synthetic construct
  source 1..23: mol_type = other RNA
tgtagcctagacagtgaaatgat

SEQ ID NO: 3524 - RNA, 23 nt, synthetic construct
  source 1..23: mol_type = other RNA
agcatcaggatatagctgtggat

SEQ ID NO: 3525 - RNA, 23 nt, synthetic construct
  source 1..23: mol_type = other RNA
tactaggcatgttcagtgaagga

SEQ ID NO: 3526 - RNA, 23 nt, synthetic construct
  source 1..23: mol_type = other RNA
ttcataagcactctcaaccacct

SEQ ID NO: 3527 - RNA, 23 nt, synthetic construct
  source 1..23: mol_type = other RNA
tgtaatgtacactactgatatag

SEQ ID NO: 3528 - RNA, 23 nt, synthetic construct
  source 1..23: mol_type = other RNA
taacacttggatagttggttgca

SEQ ID NO: 3529 - RNA, 23 nt, synthetic construct
  source 1..23: mol_type = other RNA
tatactctctgccaaatctgcta

SEQ ID NO: 3530 - RNA, 23 nt, synthetic construct
  source 1..23: mol_type = other RNA
taggcatgttcagtgaaggagcc

SEQ ID NO: 3531 - RNA, 23 nt, synthetic construct
  source 1..23: mol_type = other RNA
aaaaatgttggactaggcatgtt

SEQ ID NO: 3532 - RNA, 23 nt, synthetic construct
  source 1..23: mol_type = other RNA
ttcattaagatactgatggcaca

SEQ ID NO: 3533 - RNA, 23 nt, synthetic construct
  source 1..23: mol_type = other RNA
tttcattaagatactgatggcac

SEQ ID NO: 3534 - RNA, 23 nt, synthetic construct
  source 1..23: mol_type = other RNA
agacaatctttggtgttctaagg

SEQ ID NO: 3535 - RNA, 23 nt, synthetic construct
  source 1..23: mol_type = other RNA
tagcctagacagtgaaatgatat

SEQ ID NO: 3536 - RNA, 23 nt, synthetic construct
  source 1..23: mol_type = other RNA
ttgttgtagcctagacagtgaaa

SEQ ID NO: 3537 - RNA, 23 nt, synthetic construct
  source 1..23: mol_type = other RNA
tgtataacacttggatagttggt

SEQ ID NO: 3538 - RNA, 23 nt, synthetic construct
  source 1..23: mol_type = other RNA
tcatattggacttggaaccaaaa

SEQ ID NO: 3539 - RNA, 23 nt, synthetic construct
  source 1..23: mol_type = other RNA
agtttgatcacctcataagcact

SEQ ID NO: 3540 - RNA, 23 nt, synthetic construct
  source 1..23: mol_type = other RNA
tcaccttcacaaggtctgagatt

SEQ ID NO: 3541 - RNA, 23 nt, synthetic construct
  source 1..23: mol_type = other RNA
aggatatagctgtggattttaca

SEQ ID NO: 3542 - RNA, 23 nt, synthetic construct
  source 1..23: mol_type = other RNA
actaggcatgttcagtgaaggag

SEQ ID NO: 3543 - RNA, 23 nt, synthetic construct
  source 1..23: mol_type = other RNA
tggatttatacactggatcccag

SEQ ID NO: 3544 - RNA, 23 nt, synthetic construct
  source 1..23: mol_type = other RNA
ttcactgttcaaggtttattggg

SEQ ID NO: 3545 - RNA, 23 nt, synthetic construct
  source 1..23: mol_type = other RNA
aagatactgatggcacaggccat

SEQ ID NO: 3546 - RNA, 23 nt, synthetic construct
  source 1..23: mol_type = other RNA
tgtcttcgatgacatcaacaaga

SEQ ID NO: 3547 - RNA, 23 nt, synthetic construct
  source 1..23: mol_type = other RNA
attatactctctgccaaatctgc

SEQ ID NO: 3548 - RNA, 23 nt, synthetic construct
  source 1..23: mol_type = other RNA
tacccttaatcatggtggaaact

SEQ ID NO: 3549 - RNA, 23 nt, synthetic construct
  source 1..23: mol_type = other RNA
tagaatcctgttgtagcctagac

SEQ ID NO: 3550 - RNA, 23 nt, synthetic construct
  source 1..23: mol_type = other RNA
tgacaacatgcacaacctccacc

SEQ ID NO: 3551 - RNA, 23 nt, synthetic construct
  source 1..23: mol_type = other RNA
aggcatgttcagtgaaggagcca

SEQ ID NO: 3552 - RNA, 23 nt, synthetic construct
  source 1..23: mol_type = other RNA
tattggacttggaaccaaaagga

SEQ ID NO: 3553 - RNA, 23 nt, synthetic construct
  source 1..23: mol_type = other RNA
taagatactgatggcacaggcca

SEQ ID NO: 3554 - RNA, 23 nt, synthetic construct
  source 1..23: mol_type = other RNA
tagtttgatcacctcataagcac

SEQ ID NO: 3555 - RNA, 23 nt, synthetic construct
  source 1..23: mol_type = other RNA
tgagtttgatcacctcataagca

SEQ ID NO: 3556 - RNA, 23 nt, synthetic construct
  source 1..23: mol_type = other RNA
attctgtcccaaaatgcaaggaa

SEQ ID NO: 3557 - RNA, 23 nt, synthetic construct
  source 1..23: mol_type = other RNA
tgccatattggacttggaaccaa

SEQ ID NO: 3558 - RNA, 23 nt, synthetic construct
  source 1..23: mol_type = other RNA
tctgttgtagcctagacagtgaa

SEQ ID NO: 3559 - RNA, 23 nt, synthetic construct
  source 1..23: mol_type = other RNA
tcctgttgtagcctagacagtga

SEQ ID NO: 3560 - RNA, 23 nt, synthetic construct
  source 1..23: mol_type = other RNA
tccaacaactgtaatcttattct

SEQ ID NO: 3561 - RNA, 23 nt, synthetic construct
  source 1..23: mol_type = other RNA
tacctcataagcactctcaacca

SEQ ID NO: 3562 - RNA, 23 nt, synthetic construct
  source 1..23: mol_type = other RNA
taatcctgttgtagcctagacag

SEQ ID NO: 3563 - RNA, 23 nt, synthetic construct
  source 1..23: mol_type = other RNA
agaatcctgttgtagcctagaca

SEQ ID NO: 3564 - RNA, 23 nt, synthetic construct
  source 1..23: mol_type = other RNA
tacaacatgcacaacctccacct

SEQ ID NO: 3565 - RNA, 23 nt, synthetic construct
  source 1..23: mol_type = other RNA
tctttgagtttgatcacctcata

SEQ ID NO: 3566 - RNA, 23 nt, synthetic construct
  source 1..23: mol_type = other RNA
ttagcctttgagtttgatcacct

SEQ ID NO: 3567 - RNA, 23 nt, synthetic construct
  source 1..23: mol_type = other RNA
ttcaaacgggcctcttcctcaga

SEQ ID NO: 3568 - RNA, 23 nt, synthetic construct
  source 1..23: mol_type = other RNA
tactctcaaccacctgcttgtga

SEQ ID NO: 3569 - RNA, 23 nt, synthetic construct
  source 1..23: mol_type = other RNA
ttatactctctgccaaatctgct

SEQ ID NO: 3570 - RNA, 23 nt, synthetic construct
  source 1..23: mol_type = other RNA
gtttgatcacctcataagcactc

SEQ ID NO: 3571 - RNA, 23 nt, synthetic construct
  source 1..23: mol_type = other RNA
atactctctgccaaatctgctac

SEQ ID NO: 3572 - RNA, 23 nt, synthetic construct
  source 1..23: mol_type = other RNA
tcattatactctctgccaaatct

SEQ ID NO: 3573 - RNA, 23 nt, synthetic construct
  source 1..23: mol_type = other RNA
ttcattatactctctgccaaatc

SEQ ID NO: 3574 - RNA, 23 nt, synthetic construct
  source 1..23: mol_type = other RNA
tattctgtcccaaaatgcaagga

SEQ ID NO: 3575 - RNA, 23 nt, synthetic construct
  source 1..23: mol_type = other RNA
tcacaaggtctgagattccattc

SEQ ID NO: 3576 - RNA, 23 nt, synthetic construct
  source 1..23: mol_type = other RNA
tagcatcaggatatagctgtgga

SEQ ID NO: 3577 - RNA, 23 nt, synthetic construct
  source 1..23: mol_type = other RNA
tttcaaacgggcctcttcctcag

SEQ ID NO: 3578 - RNA, 23 nt, synthetic construct
  source 1..23: mol_type = other RNA
taaacgggcctcttcctcagaag

SEQ ID NO: 3579 - RNA, 23 nt, synthetic construct
  source 1..23: mol_type = other RNA
tacactggatcccaggatgtgac

SEQ ID NO: 3580 - RNA, 23 nt, synthetic construct
  source 1..23: mol_type = other RNA
tggtgttctaaggaaaaggctgc

SEQ ID NO: 3581 - RNA, 23 nt, synthetic construct
  source 1..23: mol_type = other RNA
tatttcacactaaccagttgaag

SEQ ID NO: 3582 - RNA, 21 nt, synthetic construct
  source 1..21: mol_type = other RNA
  modified_base 1: mod_base = OTHER; note = 2'-O-methyluridine-3'-phosphorothioate
  modified_base 2: mod_base = OTHER; note = 2'-O-methyluridine-3'-phosphorothioate
  modified_base 3: mod_base = OTHER; note = 2'-O-methyluridine-3'-phosphate
  modified_base 4: mod_base = OTHER; note = 2'-O-methyladenosine-3'-phosphate
  modified_base 5: mod_base = OTHER; note = 2'-O-methyluridine-3'-phosphate
  modified_base 6: mod_base = OTHER; note = 2'-O-methylcytidine-3'-phosphate
  modified_base 7: mod_base = OTHER; note = 2'-fluorouridine-3'-phosphate
  modified_base 8: mod_base = OTHER; note = 2'-O-methylguanosine-3'-phosphate
  modified_base 9: mod_base = OTHER; note = 2'-fluoroadenosine-3'-phosphate
  modified_base 10: mod_base = OTHER; note = 2'-fluorouridine-3'-phosphate
  modified_base 11: mod_base = OTHER; note = 2'-fluorocytidine-3'-phosphate
  modified_base 12: mod_base = OTHER; note = 2'-O-methyluridine-3'-phosphate
  modified_base 13: mod_base = OTHER; note = 2'-O-methylguanosine-3'-phosphate
  modified_base 14: mod_base = OTHER; note = 2'-O-methyluridine-3'-phosphate
  modified_base 15: mod_base = OTHER; note = 2'-O-methylguanosine-3'-phosphate
  modified_base 16: mod_base = OTHER; note = 2'-O-methyladenosine-3'-phosphate
  modified_base 17: mod_base = OTHER; note = 2'-O-methyluridine-3'-phosphate
  modified_base 18: mod_base = OTHER; note = 2'-O-methyluridine-3'-phosphate
  modified_base 19: mod_base = OTHER; note = 2'-O-methyladenosine-3'-phosphate
  modified_base 20: mod_base = OTHER; note = 2'-O-methyladenosine-3'-phosphate
  modified_base 21: mod_base = OTHER; note 2'-O-methyladenosine-3'-phosphate-N-[tris(GalNAc-alkyl)-ami dodecanoyl)]-4-hydroxyprolinol (Hyp-(GalNAc-alkyl)3)
tttatctgatctgtgattaaa

SEQ ID NO: 3583 - RNA, 21 nt, synthetic construct
  source 1..21: mol_type = other RNA
  modified_base 1: mod_base = OTHER; note = 2'-O-methyladenosine-3'- phosphorothioate
  modified_base 2: mod_base = OTHER; note = 2'-O-methylcytidine-3'- phosphorothioate
  modified_base 3: mod_base = OTHER; note = 2'-O-methyluridine-3'-phosphate
  modified_base 4: mod_base = OTHER; note = 2'-O-methylguanosine-3'-phosphate
  modified_base 5: mod_base = OTHER; note = 2'-O-methylguanosine-3'-phosphate
  modified_base 6: mod_base = OTHER; note = 2'-O-methyluridine-3'-phosphate
  modified_base 7: mod_base = OTHER; note = 2'-fluorouridine-3'-phosphate
  modified_base 8: mod_base = OTHER; note = 2'-O-methyladenosine-3'-phosphate
  modified_base 9: mod_base = OTHER; note = 2'-fluoroguanosine-3'-phosphate
  modified_base 10: mod_base = OTHER; note = 2'-fluorouridine-3'-phosphate
  modified_base 11: mod_base = OTHER; note = 2'-fluoroguanosine-3'-phosphate
  modified_base 12: mod_base = OTHER; note = 2'-O-methyluridine-3'-phosphate
  modified_base 13: mod_base = OTHER; note = 2'-O-methylguanosine-3'-phosphate
  modified_base 14: mod_base = OTHER; note = 2'-O-methyladenosine-3'-phosphate
  modified_base 15: mod_base = OTHER; note = 2'-O-methyladenosine-3'-phosphate
  modified_base 16: mod_base = OTHER; note = 2'-O-methyladenosine-3'-phosphate
  modified_base 17: mod_base = OTHER; note = 2'-O-methyluridine-3'-phosphate
  modified_base 18: mod_base = OTHER; note = 2'-O-methyladenosine-3'-phosphate
  modified_base 19: mod_base = OTHER; note = 2'-O-methylguanosine-3'-phosphate
  modified_base 20: mod_base = OTHER; note = 2'-O-methyluridine-3'-phosphate
  modified_base 21: mod_base = OTHER; note 2'-O-methyluridine-3'-phosphate-N-[tris(GalNAc-alkyl)-amido decanoyl)]-4-hydroxyprolinol (Hyp-(GalNAc-alkyl)3)
actggttagtgtgaaatagtt

SEQ ID NO: 3584 - RNA, 21 nt, synthetic construct
  source 1..21: mol_type = other RNA
  modified_base 1: mod_base = OTHER; note = 2'-O-methyladenosine-3'- phosphorothioate
  modified_base 2: mod_base = OTHER; note = 2'-O-methyladenosine-3'- phosphorothioate
  modified_base 3: mod_base = OTHER; note = 2'-O-methylcytidine-3'-phosphate
  modified_base 4: mod_base = OTHER; note = 2'-O-methyladenosine-3'-phosphate
  modified_base 5: mod_base = OTHER; note = 2'-O-methyluridine-3'-phosphate
  modified_base 6: mod_base = OTHER; note = 2'-O-methylguanosine-3'-phosphate
  modified_base 7: mod_base = OTHER; note = 2'-fluorocytidine-3'-phosphate
  modified_base 8: mod_base = OTHER; note = 2'-O-methylcytidine-3'-phosphate
  modified_base 9: mod_base = OTHER; note = 2'-fluorouridine-3'-phosphate
  modified_base 10: mod_base = OTHER; note = 2'-fluoroadenosine-3'-phosphate
  modified_base 11: mod_base = OTHER; note = 2'-fluoroguanosine-3'-phosphate
  modified_base 12: mod_base = OTHER; note = 2'-O-methyluridine-3'-phosphate
  modified_base 13: mod_base = OTHER; note = 2'-O-methylcytidine-3'-phosphate
  modified_base 14: mod_base = OTHER; note = 2'-O-methylcytidine-3'-phosphate
  modified_base 15: mod_base = OTHER; note = 2'-O-methyladenosine-3'-phosphate
  modified_base 16: mod_base = OTHER; note = 2'-O-methyladenosine-3'-phosphate
  modified_base 17: mod_base = OTHER; note = 2'-O-methylcytidine-3'-phosphate
  modified_base 18: mod_base = OTHER; note = 2'-O-methyladenosine-3'-phosphate
  modified_base 19: mod_base = OTHER; note = 2'-O-methyluridine-3'-phosphate
  modified_base 20: mod_base = OTHER; note = 2'-O-methyluridine-3'-phosphate
  modified_base 21: mod_base = OTHER; note 2'-O-methyluridine-3'-phosphate-N-[tris(GalNAc-alkyl)-amido decanoyl)]-4-hydroxyprolinol (Hyp-(GalNAc-alkyl)3)
aacatgcctagtccaacattt

SEQ ID NO: 3585 - RNA, 21 nt, synthetic construct
  source 1..21: mol_type = other RNA
  modified_base 1: mod_base = OTHER; note = 2'-O-methylcytidine-3'- phosphorothioate
  modified_base 2: mod_base = OTHER; note = 2'-O-methyladenosine-3'- phosphorothioate
  modified_base 3: mod_base = OTHER; note = 2'-O-methyladenosine-3'-phosphate
  modified_base 4: mod_base = OTHER; note = 2'-O-methylguanosine-3'-phosphate
  modified_base 5: mod_base = OTHER; note = 2'-O-methyluridine-3'-phosphate
  modified_base 6: mod_base = OTHER; note = 2'-O-methylcytidine-3'-phosphate
  modified_base 7: mod_base = OTHER; note = 2'-fluorocytidine-3'-phosphate
  modified_base 8: mod_base = OTHER; note = 2'-O-methyladenosine-3'-phosphate
  modified_base 9: mod_base = OTHER; note = 2'-fluoroadenosine-3'-phosphate
  modified_base 10: mod_base = OTHER; note = 2'-fluorouridine-3'-phosphate
  modified_base 11: mod_base = OTHER; note = 2'-fluoroadenosine-3'-phosphate
  modified_base 12: mod_base = OTHER; note = 2'-O-methyluridine-3'-phosphate
  modified_base 13: mod_base = OTHER; note = 2'-O-methylguanosine-3'-phosphate
  modified_base 14: mod_base = OTHER; note = 2'-O-methylguanosine-3'-phosphate
  modified_base 15: mod_base = OTHER; note = 2'-O-methylcytidine-3'-phosphate
  modified_base 16: mod_base = OTHER; note = 2'-O-methyladenosine-3'-phosphate
  modified_base 17: mod_base = OTHER; note = 2'-O-methyladenosine-3'-phosphate
  modified_base 18: mod_base = OTHER; note = 2'-O-methylcytidine-3'-phosphate
  modified_base 19: mod_base = OTHER; note = 2'-O-methyluridine-3'-phosphate
  modified_base 20: mod_base = OTHER; note = 2'-O-methylcytidine-3'-phosphate
  modified_base 21: mod_base = OTHER; note 2'-O-methyluridine-3'-phosphate-N-[tris(GalNAc-alkyl)-amido decanoyl)]-4-hydroxyprolinol (Hyp-(GalNAc-alkyl)3)
caagtccaatatggcaactct

SEQ ID NO: 3586 - RNA, 21 nt, synthetic construct
  source 1..21: mol_type = other RNA
  modified_base 1: mod_base = OTHER; note = 2'-O-methyluridine-3'-phosphorothioate
  modified_base 2: mod_base = OTHER; note = 2'-O-methylcytidine-3'- phosphorothioate
  modified_base 3: mod_base = OTHER; note = 2'-O-methylcytidine-3'-phosphate
  modified_base 4: mod_base = OTHER; note = 2'-O-methyladenosine-3'-phosphate
  modified_base 5: mod_base = OTHER; note = 2'-O-methylcytidine-3'-phosphate
  modified_base 6: mod_base = OTHER; note = 2'-O-methylcytidine-3'-phosphate
  modified_base 7: mod_base = OTHER; note = 2'-fluoroadenosine-3'-phosphate
  modified_base 8: mod_base = OTHER; note = 2'-O-methyluridine-3'-phosphate
  modified_base 9: mod_base = OTHER; note = 2'-fluoroguanosine-3'-phosphate
  modified_base 10: mod_base = OTHER; note = 2'-fluoroadenosine-3'-phosphate
  modified_base 11: mod_base = OTHER; note = 2'-fluorouridine-3'-phosphate
  modified_base 12: mod_base = OTHER; note = 2'-O-methyluridine-3'-phosphate
  modified_base 13: mod_base = OTHER; note = 2'-O-methyladenosine-3'-phosphate
  modified_base 14: mod_base = OTHER; note = 2'-O-methyladenosine-3'-phosphate
  modified_base 15: mod_base = OTHER; note = 2'-O-methylguanosine-3'-phosphate
  modified_base 16: mod_base = OTHER; note = 2'-O-methylguanosine-3'-phosphate
  modified_base 17: mod_base = OTHER; note = 2'-O-methylguanosine-3'-phosphate
  modified_base 18: mod_base = OTHER; note = 2'-O-methyluridine-3'-phosphate
  modified_base 19: mod_base = OTHER; note = 2'-O-methylcytidine-3'-phosphate
  modified_base 20: mod_base = OTHER; note = 2'-O-methyluridine-3'-phosphate
  modified_base 21: mod_base = OTHER; note 2'-O-methyluridine-3'-phosphate-N-[tris(GalNAc-alkyl)-amido decanoyl)]-4-hydroxyprolinol (Hyp-(GalNAc-alkyl)3)
tccaccatgattaagggtctt

SEQ ID NO: 3587 - RNA, 21 nt, synthetic construct
  source 1..21: mol_type = other RNA
  modified_base 1: mod_base = OTHER; note = 2'-O-methyluridine-3'-phosphorothioate
  modified_base 2: mod_base = OTHER; note = 2'-O-methylcytidine-3'- phosphorothioate
  modified_base 3: mod_base = OTHER; note = 2'-O-methyladenosine-3'-phosphate
  modified_base 4: mod_base = OTHER; note = 2'-O-methyluridine-3'-phosphate
  modified_base 5: mod_base = OTHER; note = 2'-O-methyluridine-3'-phosphate
  modified_base 6: mod_base = OTHER; note = 2'-O-methyluridine-3'-phosphate
  modified_base 7: mod_base = OTHER; note = 2'-fluorocytidine-3'-phosphate
  modified_base 8: mod_base = OTHER; note = 2'-O-methyladenosine-3'-phosphate
  modified_base 9: mod_base = OTHER; note = 2'-fluorocytidine-3'-phosphate
  modified_base 10: mod_base = OTHER; note = 2'-fluorouridine-3'-phosphate
  modified_base 11: mod_base = OTHER; note = 2'-fluoroguanosine-3'-phosphate
  modified_base 12: mod_base = OTHER; note = 2'-O-methyluridine-3'-phosphate
  modified_base 13: mod_base = OTHER; note = 2'-O-methylcytidine-3'-phosphate
  modified_base 14: mod_base = OTHER; note = 2'-O-methyluridine-3'-phosphate
  modified_base 15: mod_base = OTHER; note = 2'-O-methyladenosine-3'-phosphate
  modified_base 16: mod_base = OTHER; note = 2'-O-methylguanosine-3'-phosphate
  modified_base 17: mod_base = OTHER; note = 2'-O-methylguanosine-3'-phosphate
  modified_base 18: mod_base = OTHER; note = 2'-O-methylcytidine-3'-phosphate
  modified_base 19: mod_base = OTHER; note = 2'-O-methyluridine-3'-phosphate
  modified_base 20: mod_base = OTHER; note = 2'-O-methyladenosine-3'-phosphate
  modified_base 21: mod_base = OTHER; note 2'-O-methyladenosine-3'-phosphate-N-[tris(GalNAc-alkyl)-ami dodecanoyl)]-4-hydroxyprolinol (Hyp-(GalNAc-alkyl)3)
tcatttcactgtctaggctaa

SEQ ID NO: 3588 - RNA, 21 nt, synthetic construct
  source 1..21: mol_type = other RNA
  modified_base 1: mod_base = OTHER; note = 2'-O-methyluridine-3'-phosphorothioate
  modified_base 2: mod_base = OTHER; note = 2'-O-methylguanosine-3'- phosphorothioate
  modified_base 3: mod_base = OTHER; note = 2'-O-methyluridine-3'-phosphate
  modified_base 4: mod_base = OTHER; note = 2'-O-methylcytidine-3'-phosphate
  modified_base 5: mod_base = OTHER; note = 2'-O-methylcytidine-3'-phosphate
  modified_base 6: mod_base = OTHER; note = 2'-O-methyluridine-3'-phosphate
  modified_base 7: mod_base = OTHER; note = 2'-fluorouridine-3'-phosphate
  modified_base 8: mod_base = OTHER; note = 2'-O-methyluridine-3'-phosphate
  modified_base 9: mod_base = OTHER; note = 2'-fluorouridine-3'-phosphate
  modified_base 10: mod_base = OTHER; note = 2'-fluorouridine-3'-phosphate
  modified_base 11: mod_base = OTHER; note = 2'-fluoroadenosine-3'-phosphate
  modified_base 12: mod_base = OTHER; note = 2'-O-methyluridine-3'-phosphate
  modified_base 13: mod_base = OTHER; note = 2'-O-methylcytidine-3'-phosphate
  modified_base 14: mod_base = OTHER; note = 2'-O-methyluridine-3'-phosphate
  modified_base 15: mod_base = OTHER; note = 2'-O-methylguanosine-3'-phosphate
  modified_base 16: mod_base = OTHER; note = 2'-O-methyladenosine-3'-phosphate
  modified_base 17: mod_base = OTHER; note = 2'-O-methyluridine-3'-phosphate
  modified_base 18: mod_base = OTHER; note = 2'-O-methylcytidine-3'-phosphate
  modified_base 19: mod_base = OTHER; note = 2'-O-methyluridine-3'-phosphate
  modified_base 20: mod_base = OTHER; note = 2'-O-methylguanosine-3'-phosphate
  modified_base 21: mod_base = OTHER; note 2'-O-methyluridine-3'-phosphate-N-[tris(GalNAc-alkyl)-amido decanoyl)]-4-hydroxyprolinol (Hyp-(GalNAc-alkyl)3)
tgtcctttttatctgatctgt

SEQ ID NO: 3589 - RNA, 21 nt, synthetic construct
  source 1..21: mol_type = other RNA
  modified_base 1: mod_base = OTHER; note = 2'-O-methylcytidine-3'- phosphorothioate
  modified_base 2: mod_base = OTHER; note = 2'-O-methylcytidine-3'- phosphorothioate
  modified_base 3: mod_base = OTHER; note = 2'-O-methyladenosine-3'-phosphate
  modified_base 4: mod_base = OTHER; note = 2'-O-methylguanosine-3'-phosphate
  modified_base 5: mod_base = OTHER; note = 2'-O-methyluridine-3'-phosphate
  modified_base 6: mod_base = OTHER; note = 2'-O-methylguanosine-3'-phosphate
  modified_base 7: mod_base = OTHER; note = 2'-fluorouridine-3'-phosphate
  modified_base 8: mod_base = OTHER; note = 2'-O-methyladenosine-3'-phosphate
  modified_base 9: mod_base = OTHER; note = 2'-fluorouridine-3'-phosphate
  modified_base 10: mod_base = OTHER; note = 2'-fluoroadenosine-3'-phosphate
  modified_base 11: mod_base = OTHER; note = 2'-fluoroadenosine-3'-phosphate
  modified_base 12: mod_base = OTHER; note = 2'-O-methyladenosine-3'-phosphate
  modified_base 13: mod_base = OTHER; note = 2'-O-methyluridine-3'-phosphate
  modified_base 14: mod_base = OTHER; note = 2'-O-methylcytidine-3'-phosphate
  modified_base 15: mod_base = OTHER; note = 2'-O-methylcytidine-3'-phosphate
  modified_base 16: mod_base = OTHER; note = 2'-O-methyladenosine-3'-phosphate
  modified_base 17: mod_base = OTHER; note = 2'-O-methyladenosine-3'-phosphate
  modified_base 18: mod_base = OTHER; note = 2'-O-methyluridine-3'-phosphate
  modified_base 19: mod_base = OTHER; note = 2'-O-methyladenosine-3'-phosphate
  modified_base 20: mod_base = OTHER; note = 2'-O-methyluridine-3'-phosphate
  modified_base 21: mod_base = OTHER; note 2'-O-methyladenosine-3'-phosphate-N-[tris(GalNAc-alkyl)-ami dodecanoyl)]-4-hydroxyprolinol (Hyp-(GalNAc-alkyl)3)
ccagtgtataaatccaatata

SEQ ID NO: 3590 - RNA, 21 nt, synthetic construct
  source 1..21: mol_type = other RNA
  modified_base 1: mod_base = OTHER; note = 2'-O-methyluridine-3'-phosphorothioate
  modified_base 2: mod_base = OTHER; note = 2'-O-methylcytidine-3'- phosphorothioate
  modified_base 3: mod_base = OTHER; note = 2'-O-methylcytidine-3'-phosphate
  modified_base 4: mod_base = OTHER; note = 2'-O-methyladenosine-3'-phosphate
  modified_base 5: mod_base = OTHER; note = 2'-O-methyladenosine-3'-phosphate
  modified_base 6: mod_base = OTHER; note = 2'-O-methylguanosine-3'-phosphate
  modified_base 7: mod_base = OTHER; note = 2'-fluorouridine-3'-phosphate
  modified_base 8: mod_base = OTHER; note = 2'-O-methylguanosine-3'-phosphate
  modified_base 9: mod_base = OTHER; note = 2'-fluorouridine-3'-phosphate
  modified_base 10: mod_base = OTHER; note = 2'-fluorouridine-3'-phosphate
  modified_base 11: mod_base = OTHER; note = 2'-fluoroadenosine-3'-phosphate
  modified_base 12: mod_base = OTHER; note = 2'-O-methyluridine-3'-phosphate
  modified_base 13: mod_base = OTHER; note = 2'-O-methyladenosine-3'-phosphate
  modified_base 14: mod_base = OTHER; note = 2'-O-methylcytidine-3'-phosphate
  modified_base 15: mod_base = OTHER; note = 2'-O-methylcytidine-3'-phosphate
  modified_base 16: mod_base = OTHER; note = 2'-O-methyladenosine-3'-phosphate
  modified_base 17: mod_base = OTHER; note = 2'-O-methyladenosine-3'-phosphate
  modified_base 18: mod_base = OTHER; note = 2'-O-methylcytidine-3'-phosphate
  modified_base 19: mod_base = OTHER; note = 2'-O-methyluridine-3'-phosphate
  modified_base 20: mod_base = OTHER; note = 2'-O-methyladenosine-3'-phosphate
  modified_base 21: mod_base = OTHER; note 2'-O-methyladenosine-3'-phosphate-N-[tris(GalNAc-alkyl)-ami dodecanoyl)]-4-hydroxyprolinol (Hyp-(GalNAc-alkyl)3)
tccaagtgttataccaactaa

SEQ ID NO: 3591 - RNA, 21 nt, synthetic construct
  source 1..21: mol_type = other RNA
  modified_base 1: mod_base = OTHER; note = 2'-O-methylguanosine-3'- phosphorothioate
  modified_base 2: mod_base = OTHER; note = 2'-O-methyluridine-3'-phosphorothioate
  modified_base 3: mod_base = OTHER; note = 2'-O-methylcytidine-3'-phosphate
  modified_base 4: mod_base = OTHER; note = 2'-O-methyladenosine-3'-phosphate
  modified_base 5: mod_base = OTHER; note = 2'-O-methyluridine-3'-phosphate
  modified_base 6: mod_base = OTHER; note = 2'-O-methylcytidine-3'-phosphate
  modified_base 7: mod_base = OTHER; note = 2'-fluoroguanosine-3'-phosphate
  modified_base 8: mod_base = OTHER; note = 2'-O-methyladenosine-3'-phosphate
  modified_base 9: mod_base = OTHER; note = 2'-fluoroadenosine-3'-phosphate
  modified_base 10: mod_base = OTHER; note = 2'-fluoroguanosine-3'-phosphate
  modified_base 11: mod_base = OTHER; note = 2'-fluoroadenosine-3'-phosphate
  modified_base 12: mod_base = OTHER; note = 2'-O-methylcytidine-3'-phosphate
  modified_base 13: mod_base = OTHER; note = 2'-O-methyladenosine-3'-phosphate
  modified_base 14: mod_base = OTHER; note = 2'-O-methyladenosine-3'-phosphate
  modified_base 15: mod_base = OTHER; note = 2'-O-methyladenosine-3'-phosphate
  modified_base 16: mod_base = OTHER; note = 2'-O-methyluridine-3'-phosphate
  modified_base 17: mod_base = OTHER; note = 2'-O-methyluridine-3'-phosphate
  modified_base 18: mod_base = OTHER; note = 2'-O-methylguanosine-3'-phosphate
  modified_base 19: mod_base = OTHER; note = 2'-O-methyladenosine-3'-phosphate
  modified_base 20: mod_base = OTHER; note = 2'-O-methyladenosine-3'-phosphate
  modified_base 21: mod_base = OTHER; note 2'-O-methyladenosine-3'-phosphate-N-[tris(GalNAc-alkyl)-ami dodecanoyl)]-4-hydroxyprolinol (Hyp-(GalNAc-alkyl)3)
gtcatcgaagacaaattgaaa

SEQ ID NO: 3592 - RNA, 21 nt, synthetic construct
  source 1..21: mol_type = other RNA
  modified_base 1: mod_base = OTHER; note = 2'-O-methylguanosine-3'- phosphorothioate
  modified_base 2: mod_base = OTHER; note = 2'-O-methyladenosine-3'- phosphorothioate
  modified_base 3: mod_base = OTHER; note = 2'-O-methyladenosine-3'-phosphate
  modified_base 4: mod_base = OTHER; note = 2'-O-methylcytidine-3'-phosphate
  modified_base 5: mod_base = OTHER; note = 2'-O-methyladenosine-3'-phosphate
  modified_base 6: mod_base = OTHER; note = 2'-O-methylcytidine-3'-phosphate
  modified_base 7: mod_base = OTHER; note = 2'-fluorocytidine-3'-phosphate
  modified_base 8: mod_base = OTHER; note = 2'-O-methyladenosine-3'-phosphate
  modified_base 9: mod_base = OTHER; note = 2'-fluoroadenosine-3'-phosphate
  modified_base 10: mod_base = OTHER; note = 2'-fluoroadenosine-3'-phosphate
  modified_base 11: mod_base = OTHER; note = 2'-fluoroguanosine-3'-phosphate
  modified_base 12: mod_base = OTHER; note = 2'-O-methyladenosine-3'-phosphate
  modified_base 13: mod_base = OTHER; note = 2'-O-methyluridine-3'-phosphate
  modified_base 14: mod_base = OTHER; note = 2'-O-methyluridine-3'-phosphate
  modified_base 15: mod_base = OTHER; note = 2'-O-methylguanosine-3'-phosphate
  modified_base 16: mod_base = OTHER; note = 2'-O-methyluridine-3'-phosphate
  modified_base 17: mod_base = OTHER; note = 2'-O-methylcytidine-3'-phosphate
  modified_base 18: mod_base = OTHER; note = 2'-O-methyluridine-3'-phosphate
  modified_base 19: mod_base = OTHER; note = 2'-O-methylcytidine-3'-phosphate
  modified_base 20: mod_base = OTHER; note = 2'-O-methyluridine-3'-phosphate
  modified_base 21: mod_base = OTHER; note 2'-O-methyladenosine-3'-phosphate-N-[tris(GalNAc-alkyl)-ami dodecanoyl)]-4-hydroxyprolinol (Hyp-(GalNAc-alkyl)3)
gaacaccaaagattgtctcta

SEQ ID NO: 3593 - RNA, 21 nt, synthetic construct
  source 1..21: mol_type = other RNA
  modified_base 1: mod_base = OTHER; note = 2'-O-methyladenosine-3'- phosphorothioate
  modified_base 2: mod_base = OTHER; note = 2'-O-methyladenosine-3'- phosphorothioate
  modified_base 3: mod_base = OTHER; note = 2'-O-methylcytidine-3'-phosphate
  modified_base 4: mod_base = OTHER; note = 2'-O-methyladenosine-3'-phosphate
  modified_base 5: mod_base = OTHER; note = 2'-O-methylcytidine-3'-phosphate
  modified_base 6: mod_base = OTHER; note = 2'-O-methylcytidine-3'-phosphate
  modified_base 7: mod_base = OTHER; note = 2'-fluoroadenosine-3'-phosphate
  modified_base 8: mod_base = OTHER; note = 2'-O-methyladenosine-3'-phosphate
  modified_base 9: mod_base = OTHER; note = 2'-fluoroadenosine-3'-phosphate
  modified_base 10: mod_base = OTHER; note = 2'-fluoroguanosine-3'-phosphate
  modified_base 11: mod_base = OTHER; note = 2'-fluoroadenosine-3'-phosphate
  modified_base 12: mod_base = OTHER; note = 2'-O-methyluridine-3'-phosphate
  modified_base 13: mod_base = OTHER; note = 2'-O-methyluridine-3'-phosphate
  modified_base 14: mod_base = OTHER; note = 2'-O-methylguanosine-3'-phosphate
  modified_base 15: mod_base = OTHER; note = 2'-O-methyluridine-3'-phosphate
  modified_base 16: mod_base = OTHER; note = 2'-O-methylcytidine-3'-phosphate
  modified_base 17: mod_base = OTHER; note = 2'-O-methyluridine-3'-phosphate
  modified_base 18: mod_base = OTHER; note = 2'-O-methylcytidine-3'-phosphate
  modified_base 19: mod_base = OTHER; note = 2'-O-methyluridine-3'-phosphate
  modified_base 20: mod_base = OTHER; note = 2'-O-methylguanosine-3'-phosphate
  modified_base 21: mod_base = OTHER; note 2'-O-methyladenosine-3'-phosphate-N-[tris(GalNAc-alkyl)-ami dodecanoyl)]-4-hydroxyprolinol (Hyp-(GalNAc-alkyl)3)
aacaccaaagattgtctctga

SEQ ID NO: 3594 - RNA, 21 nt, synthetic construct
  source 1..21: mol_type = other RNA
  modified_base 1: mod_base = OTHER; note = 2'-O-methyladenosine-3'- phosphorothioate
  modified_base 2: mod_base = OTHER; note = 2'-O-methyluridine-3'-phosphorothioate
  modified_base 3: mod_base = OTHER; note = 2'-O-methylguanosine-3'-phosphate
  modified_base 4: mod_base = OTHER; note = 2'-O-methyluridine-3'-phosphate
  modified_base 5: mod_base = OTHER; note = 2'-O-methyluridine-3'-phosphate
  modified_base 6: mod_base = OTHER; note = 2'-O-methylguanosine-3'-phosphate
  modified_base 7: mod_base = OTHER; note = 2'-fluorouridine-3'-phosphate
  modified_base 8: mod_base = OTHER; note = 2'-O-methylcytidine-3'-phosphate
  modified_base 9: mod_base = OTHER; note = 2'-fluorocytidine-3'-phosphate
  modified_base 10: mod_base = OTHER; note = 2'-fluorouridine-3'-phosphate
  modified_base 11: mod_base = OTHER; note = 2'-fluorouridine-3'-phosphate
  modified_base 12: mod_base = OTHER; note = 2'-O-methyluridine-3'-phosphate
  modified_base 13: mod_base = OTHER; note = 2'-O-methyluridine-3'-phosphate
  modified_base 14: mod_base = OTHER; note = 2'-O-methyluridine-3'-phosphate
  modified_base 15: mod_base = OTHER; note = 2'-O-methyladenosine-3'-phosphate
  modified_base 16: mod_base = OTHER; note = 2'-O-methyluridine-3'-phosphate
  modified_base 17: mod_base = OTHER; note = 2'-O-methylcytidine-3'-phosphate
  modified_base 18: mod_base = OTHER; note = 2'-O-methyluridine-3'-phosphate
  modified_base 19: mod_base = OTHER; note = 2'-O-methylguanosine-3'-phosphate
  modified_base 20: mod_base = OTHER; note = 2'-O-methyladenosine-3'-phosphate
  modified_base 21: mod_base = OTHER; note 2'-O-methyluridine-3'-phosphate-N-[tris(GalNAc-alkyl)-amido decanoyl)]-4-hydroxyprolinol (Hyp-(GalNAc-alkyl)3)
atgttgtcctttttatctgat

SEQ ID NO: 3595 - RNA, 21 nt, synthetic construct
  source 1..21: mol_type = other RNA
  modified_base 1: mod_base = OTHER; note = 2'-O-methyluridine-3'-phosphorothioate
  modified_base 2: mod_base = OTHER; note = 2'-O-methylcytidine-3'- phosphorothioate
  modified_base 3: mod_base = OTHER; note = 2'-O-methyladenosine-3'-phosphate
  modified_base 4: mod_base = OTHER; note = 2'-O-methyladenosine-3'-phosphate
  modified_base 5: mod_base = OTHER; note = 2'-O-methylcytidine-3'-phosphate
  modified_base 6: mod_base = OTHER; note = 2'-O-methyluridine-3'-phosphate
  modified_base 7: mod_base = OTHER; note = 2'-fluorocytidine-3'-phosphate
  modified_base 8: mod_base = OTHER; note = 2'-O-methylcytidine-3'-phosphate
  modified_base 9: mod_base = OTHER; note = 2'-fluorouridine-3'-phosphate
  modified_base 10: mod_base = OTHER; note = 2'-fluoroguanosine-3'-phosphate
  modified_base 11: mod_base = OTHER; note = 2'-fluoroadenosine-3'-phosphate
  modified_base 12: mod_base = OTHER; note = 2'-O-methyladenosine-3'-phosphate
  modified_base 13: mod_base = OTHER; note = 2'-O-methylguanosine-3'-phosphate
  modified_base 14: mod_base = OTHER; note = 2'-O-methyluridine-3'-phosphate
  modified_base 15: mod_base = OTHER; note = 2'-O-methyluridine-3'-phosphate
  modified_base 16: mod_base = OTHER; note = 2'-O-methyladenosine-3'-phosphate
  modified_base 17: mod_base = OTHER; note = 2'-O-methylguanosine-3'-phosphate
  modified_base 18: mod_base = OTHER; note = 2'-O-methyladenosine-3'-phosphate
  modified_base 19: mod_base = OTHER; note = 2'-O-methyladenosine-3'-phosphate
  modified_base 20: mod_base = OTHER; note = 2'-O-methyladenosine-3'-phosphate
  modified_base 21: mod_base = OTHER; note 2'-O-methyluridine-3'-phosphate-N-[tris(GalNAc-alkyl)-amido decanoyl)]-4-hydroxyprolinol (Hyp-(GalNAc-alkyl)3)
tcaactcctgaagttagaaat

SEQ ID NO: 3596 - RNA, 21 nt, synthetic construct
  source 1..21: mol_type = other RNA
  modified_base 1: mod_base = OTHER; note = 2'-O-methyladenosine-3'- phosphorothioate
  modified_base 2: mod_base = OTHER; note = 2'-O-methyladenosine-3'- phosphorothioate
  modified_base 3: mod_base = OTHER; note = 2'-O-methylcytidine-3'-phosphate
  modified_base 4: mod_base = OTHER; note = 2'-O-methyluridine-3'-phosphate
  modified_base 5: mod_base = OTHER; note = 2'-O-methyladenosine-3'-phosphate
  modified_base 6: mod_base = OTHER; note = 2'-O-methyluridine-3'-phosphate
  modified_base 7: mod_base = OTHER; note = 2'-fluorocytidine-3'-phosphate
  modified_base 8: mod_base = OTHER; note = 2'-O-methylcytidine-3'-phosphate
  modified_base 9: mod_base = OTHER; note = 2'-fluoroadenosine-3'-phosphate
  modified_base 10: mod_base = OTHER; note = 2'-fluoroadenosine-3'-phosphate
  modified_base 11: mod_base = OTHER; note = 2'-fluoroguanosine-3'-phosphate
  modified_base 12: mod_base = OTHER; note = 2'-O-methyluridine-3'-phosphate
  modified_base 13: mod_base = OTHER; note = 2'-O-methylguanosine-3'-phosphate
  modified_base 14: mod_base = OTHER; note = 2'-O-methyluridine-3'-phosphate
  modified_base 15: mod_base = OTHER; note = 2'-O-methyluridine-3'-phosphate
  modified_base 16: mod_base = OTHER; note = 2'-O-methyladenosine-3'-phosphate
  modified_base 17: mod_base = OTHER; note = 2'-O-methyluridine-3'-phosphate
  modified_base 18: mod_base = OTHER; note = 2'-O-methyladenosine-3'-phosphate
  modified_base 19: mod_base = OTHER; note = 2'-O-methylcytidine-3'-phosphate
  modified_base 20: mod_base = OTHER; note = 2'-O-methylcytidine-3'-phosphate
  modified_base 21: mod_base = OTHER; note 2'-O-methyladenosine-3'-phosphate-N-[tris(GalNAc-alkyl)-ami dodecanoyl)]-4-hydroxyprolinol (Hyp-(GalNAc-alkyl)3)
aactatccaagtgttatacca

SEQ ID NO: 3597 - RNA, 21 nt, synthetic construct
  source 1..21: mol_type = other RNA
  modified_base 1: mod_base = OTHER; note = 2'-O-methyluridine-3'-phosphorothioate
  modified_base 2: mod_base = OTHER; note = 2'-O-methylcytidine-3'- phosphorothioate
  modified_base 3: mod_base = OTHER; note = 2'-O-methylcytidine-3'-phosphate
  modified_base 4: mod_base = OTHER; note = 2'-O-methyluridine-3'-phosphate
  modified_base 5: mod_base = OTHER; note = 2'-O-methyluridine-3'-phosphate
  modified_base 6: mod_base = OTHER; note = 2'-O-methyladenosine-3'-phosphate
  modified_base 7: mod_base = OTHER; note = 2'-fluoroguanosine-3'-phosphate
  modified_base 8: mod_base = OTHER; note = 2'-O-methyladenosine-3'-phosphate
  modified_base 9: mod_base = OTHER; note = 2'-fluoroadenosine-3'-phosphate
  modified_base 10: mod_base = OTHER; note = 2'-fluorocytidine-3'-phosphate
  modified_base 11: mod_base = OTHER; note = 2'-fluoroadenosine-3'-phosphate
  modified_base 12: mod_base = OTHER; note = 2'-O-methylcytidine-3'-phosphate
  modified_base 13: mod_base = OTHER; note = 2'-O-methylcytidine-3'-phosphate
  modified_base 14: mod_base = OTHER; note = 2'-O-methyladenosine-3'-phosphate
  modified_base 15: mod_base = OTHER; note = 2'-O-methyladenosine-3'-phosphate
  modified_base 16: mod_base = OTHER; note = 2'-O-methyladenosine-3'-phosphate
  modified_base 17: mod_base = OTHER; note = 2'-O-methylguanosine-3'-phosphate
  modified_base 18: mod_base = OTHER; note = 2'-O-methyladenosine-3'-phosphate
  modified_base 19: mod_base = OTHER; note = 2'-O-methyluridine-3'-phosphate
  modified_base 20: mod_base = OTHER; note = 2'-O-methyluridine-3'-phosphate
  modified_base 21: mod_base = OTHER; note 2'-O-methyladenosine-3'-phosphate-N-[tris(GalNAc-alkyl)-ami dodecanoyl)]-4-hydroxyprolinol (Hyp-(GalNAc-alkyl)3)
tccttagaacaccaaagatta

SEQ ID NO: 3598 - RNA, 21 nt, synthetic construct
  source 1..21: mol_type = other RNA
  modified_base 1: mod_base = OTHER; note = 2'-O-methylguanosine-3'- phosphorothioate
  modified_base 2: mod_base = OTHER; note = 2'-O-methylguanosine-3'- phosphorothioate
  modified_base 3: mod_base = OTHER; note = 2'-O-methyluridine-3'-phosphate
  modified_base 4: mod_base = OTHER; note = 2'-O-methyladenosine-3'-phosphate
  modified_base 5: mod_base = OTHER; note = 2'-O-methyluridine-3'-phosphate
  modified_base 6: mod_base = OTHER; note = 2'-O-methyluridine-3'-phosphate
  modified_base 7: mod_base = OTHER; note = 2'-fluoroadenosine-3'-phosphate
  modified_base 8: mod_base = OTHER; note = 2'-O-methyladenosine-3'-phosphate
  modified_base 9: mod_base = OTHER; note = 2'-fluorouridine-3'-phosphate
  modified_base 10: mod_base = OTHER; note = 2'-fluorocytidine-3'-phosphate
  modified_base 11: mod_base = OTHER; note = 2'-fluorouridine-3'-phosphate
  modified_base 12: mod_base = OTHER; note = 2'-O-methyluridine-3'-phosphate
  modified_base 13: mod_base = OTHER; note = 2'-O-methylguanosine-3'-phosphate
  modified_base 14: mod_base = OTHER; note = 2'-O-methyluridine-3'-phosphate
  modified_base 15: mod_base = OTHER; note = 2'-O-methylguanosine-3'-phosphate
  modified_base 16: mod_base = OTHER; note = 2'-O-methyluridine-3'-phosphate
  modified_base 17: mod_base = OTHER; note = 2'-O-methyladenosine-3'-phosphate
  modified_base 18: mod_base = OTHER; note = 2'-O-methylguanosine-3'-phosphate
  modified_base 19: mod_base = OTHER; note = 2'-O-methyluridine-3'-phosphate
  modified_base 20: mod_base = OTHER; note = 2'-O-methylcytidine-3'-phosphate
  modified_base 21: mod_base = OTHER; note 2'-O-methyluridine-3'-phosphate-N-[tris(GalNAc-alkyl)-amido decanoyl)]-4-hydroxyprolinol (Hyp-(GalNAc-alkyl)3)
ggtattaatcttgtgtagtct

SEQ ID NO: 3599 - RNA, 21 nt, synthetic construct
  source 1..21: mol_type = other RNA
  modified_base 1: mod_base = OTHER; note = 2'-O-methylguanosine-3'- phosphorothioate
  modified_base 2: mod_base = OTHER; note = 2'-O-methylguanosine-3'- phosphorothioate
  modified_base 3: mod_base = OTHER; note = 2'-O-methylcytidine-3'-phosphate
  modified_base 4: mod_base = OTHER; note = 2'-O-methyluridine-3'-phosphate
  modified_base 5: mod_base = OTHER; note = 2'-O-methylcytidine-3'-phosphate
  modified_base 6: mod_base = OTHER; note = 2'-O-methylcytidine-3'-phosphate
  modified_base 7: mod_base = OTHER; note = 2'-fluorouridine-3'-phosphate
  modified_base 8: mod_base = OTHER; note = 2'-O-methyluridine-3'-phosphate
  modified_base 9: mod_base = OTHER; note = 2'-fluorocytidine-3'-phosphate
  modified_base 10: mod_base = OTHER; note = 2'-fluoroadenosine-3'-phosphate
  modified_base 11: mod_base = OTHER; note = 2'-fluorocytidine-3'-phosphate
  modified_base 12: mod_base = OTHER; note = 2'-O-methyluridine-3'-phosphate
  modified_base 13: mod_base = OTHER; note = 2'-O-methylguanosine-3'-phosphate
  modified_base 14: mod_base = OTHER; note = 2'-O-methyladenosine-3'-phosphate
  modified_base 15: mod_base = OTHER; note = 2'-O-methyladenosine-3'-phosphate
  modified_base 16: mod_base = OTHER; note = 2'-O-methylcytidine-3'-phosphate
  modified_base 17: mod_base = OTHER; note = 2'-O-methyladenosine-3'-phosphate
  modified_base 18: mod_base = OTHER; note = 2'-O-methyluridine-3'-phosphate
  modified_base 19: mod_base = OTHER; note = 2'-O-methylguanosine-3'-phosphate
  modified_base 20: mod_base = OTHER; note = 2'-O-methylcytidine-3'-phosphate
  modified_base 21: mod_base = OTHER; note 2'-O-methyladenosine-3'-phosphate-N-[tris(GalNAc-alkyl)-ami dodecanoyl)]-4-hydroxyprolinol (Hyp-(GalNAc-alkyl)3)
ggctccttcactgaacatgca

SEQ ID NO: 3600 - RNA, 21 nt, synthetic construct
  source 1..21: mol_type = other RNA
  modified_base 1: mod_base = OTHER; note = 2'-O-methyluridine-3'-phosphorothioate
  modified_base 2: mod_base = OTHER; note = 2'-O-methyladenosine-3'- phosphorothioate
  modified_base 3: mod_base = OTHER; note = 2'-O-methyluridine-3'-phosphate
  modified_base 4: mod_base = OTHER; note = 2'-O-methylcytidine-3'-phosphate
  modified_base 5: mod_base = OTHER; note = 2'-O-methyladenosine-3'-phosphate
  modified_base 6: mod_base = OTHER; note = 2'-O-methylguanosine-3'-phosphate
  modified_base 7: mod_base = OTHER; note = 2'-fluorouridine-3'-phosphate
  modified_base 8: mod_base = OTHER; note = 2'-O-methyladenosine-3'-phosphate
  modified_base 9: mod_base = OTHER; note = 2'-fluoroguanosine-3'-phosphate
  modified_base 10: mod_base = OTHER; note = 2'-fluorouridine-3'-phosphate
  modified_base 11: mod_base = OTHER; note = 2'-fluoroguanosine-3'-phosphate
  modified_base 12: mod_base = OTHER; note = 2'-O-methyluridine-3'-phosphate
  modified_base 13: mod_base = OTHER; note = 2'-O-methyladenosine-3'-phosphate
  modified_base 14: mod_base = OTHER; note = 2'-O-methylcytidine-3'-phosphate
  modified_base 15: mod_base = OTHER; note = 2'-O-methyladenosine-3'-phosphate
  modified_base 16: mod_base = OTHER; note = 2'-O-methyluridine-3'-phosphate
  modified_base 17: mod_base = OTHER; note = 2'-O-methyluridine-3'-phosphate
  modified_base 18: mod_base = OTHER; note = 2'-O-methyladenosine-3'-phosphate
  modified_base 19: mod_base = OTHER; note = 2'-O-methylcytidine-3'-phosphate
  modified_base 20: mod_base = OTHER; note = 2'-O-methylcytidine-3'-phosphate
  modified_base 21: mod_base = OTHER; note 2'-O-methyladenosine-3'-phosphate-N-[tris(GalNAc-alkyl)-ami dodecanoyl)]-4-hydroxyprolinol (Hyp-(GalNAc-alkyl)3)
tatcagtagtgtacattacca

SEQ ID NO: 3601 - RNA, 21 nt, synthetic construct
  source 1..21: mol_type = other RNA
  modified_base 1: mod_base = OTHER; note = 2'-O-methylcytidine-3'- phosphorothioate
  modified_base 2: mod_base = OTHER; note = 2'-O-methyladenosine-3'- phosphorothioate
  modified_base 3: mod_base = OTHER; note = 2'-O-methylguanosine-3'-phosphate
  modified_base 4: mod_base = OTHER; note = 2'-O-methylcytidine-3'-phosphate
  modified_base 5: mod_base = OTHER; note = 2'-O-methylcytidine-3'-phosphate
  modified_base 6: mod_base = OTHER; note = 2'-O-methyluridine-3'-phosphate
  modified_base 7: mod_base = OTHER; note = 2'-fluorouridine-3'-phosphate
  modified_base 8: mod_base = OTHER; note = 2'-O-methyluridine-3'-phosphate
  modified_base 9: mod_base = OTHER; note = 2'-fluorouridine-3'-phosphate
  modified_base 10: mod_base = OTHER; note = 2'-fluorocytidine-3'-phosphate
  modified_base 11: mod_base = OTHER; note = 2'-fluorocytidine-3'-phosphate
  modified_base 12: mod_base = OTHER; note = 2'-O-methyluridine-3'-phosphate
  modified_base 13: mod_base = OTHER; note = 2'-O-methyluridine-3'-phosphate
  modified_base 14: mod_base = OTHER; note = 2'-O-methyladenosine-3'-phosphate
  modified_base 15: mod_base = OTHER; note = 2'-O-methylguanosine-3'-phosphate
  modified_base 16: mod_base = OTHER; note = 2'-O-methyladenosine-3'-phosphate
  modified_base 17: mod_base = OTHER; note = 2'-O-methyladenosine-3'-phosphate
  modified_base 18: mod_base = OTHER; note = 2'-O-methylcytidine-3'-phosphate
  modified_base 19: mod_base = OTHER; note = 2'-O-methyladenosine-3'-phosphate
  modified_base 20: mod_base = OTHER; note = 2'-O-methylcytidine-3'-phosphate
  modified_base 21: mod_base = OTHER; note 2'-O-methyladenosine-3'-phosphate-N-[tris(GalNAc-alkyl)-ami dodecanoyl)]-4-hydroxyprolinol (Hyp-(GalNAc-alkyl)3)
cagccttttccttagaacaca

SEQ ID NO: 3602 - RNA, 21 nt, synthetic construct
  source 1..21: mol_type = other RNA
  modified_base 1: mod_base = OTHER; note = 2'-O-methylcytidine-3'- phosphorothioate
  modified_base 2: mod_base = OTHER; note = 2'-O-methyluridine-3'-phosphorothioate
  modified_base 3: mod_base = OTHER; note = 2'-O-methylguanosine-3'-phosphate
  modified_base 4: mod_base = OTHER; note = 2'-O-methylguanosine-3'-phosphate
  modified_base 5: mod_base = OTHER; note = 2'-O-methyluridine-3'-phosphate
  modified_base 6: mod_base = OTHER; note = 2'-O-methyluridine-3'-phosphate
  modified_base 7: mod_base = OTHER; note = 2'-fluoroadenosine-3'-phosphate
  modified_base 8: mod_base = OTHER; note = 2'-O-methylguanosine-3'-phosphate
  modified_base 9: mod_base = OTHER; note = 2'-fluorouridine-3'-phosphate
  modified_base 10: mod_base = OTHER; note = 2'-fluoroguanosine-3'-phosphate
  modified_base 11: mod_base = OTHER; note = 2'-fluorouridine-3'-phosphate
  modified_base 12: mod_base = OTHER; note = 2'-O-methylguanosine-3'-phosphate
  modified_base 13: mod_base = OTHER; note = 2'-O-methyladenosine-3'-phosphate
  modified_base 14: mod_base = OTHER; note = 2'-O-methyladenosine-3'-phosphate
  modified_base 15: mod_base = OTHER; note = 2'-O-methyladenosine-3'-phosphate
  modified_base 16: mod_base = OTHER; note = 2'-O-methyluridine-3'-phosphate
  modified_base 17: mod_base = OTHER; note = 2'-O-methyladenosine-3'-phosphate
  modified_base 18: mod_base = OTHER; note = 2'-O-methylguanosine-3'-phosphate
  modified_base 19: mod_base = OTHER; note = 2'-O-methyluridine-3'-phosphate
  modified_base 20: mod_base = OTHER; note = 2'-O-methyluridine-3'-phosphate
  modified_base 21: mod_base = OTHER; note 2'-O-methyladenosine-3'-phosphate-N-[tris(GalNAc-alkyl)-ami dodecanoyl)]-4-hydroxyprolinol (Hyp-(GalNAc-alkyl)3)
ctggttagtgtgaaatagtta

SEQ ID NO: 3603 - RNA, 21 nt, synthetic construct
  source 1..21: mol_type = other RNA
  modified_base 1: mod_base = OTHER; note = 2'-O-methyladenosine-3'- phosphorothioate
  modified_base 2: mod_base = OTHER; note = 2'-O-methylcytidine-3'- phosphorothioate
  modified_base 3: mod_base = OTHER; note = 2'-O-methyluridine-3'-phosphate
  modified_base 4: mod_base = OTHER; note = 2'-O-methyladenosine-3'-phosphate
  modified_base 5: mod_base = OTHER; note = 2'-O-methyluridine-3'-phosphate
  modified_base 6: mod_base = OTHER; note = 2'-O-methyladenosine-3'-phosphate
  modified_base 7: mod_base = OTHER; note = 2'-fluorouridine-3'-phosphate
  modified_base 8: mod_base = OTHER; note = 2'-O-methylcytidine-3'-phosphate
  modified_base 9: mod_base = OTHER; note = 2'-fluoroadenosine-3'-phosphate
  modified_base 10: mod_base = OTHER; note = 2'-fluoroguanosine-3'-phosphate
  modified_base 11: mod_base = OTHER; note = 2'-fluorouridine-3'-phosphate
  modified_base 12: mod_base = OTHER; note = 2'-O-methyladenosine-3'-phosphate
  modified_base 13: mod_base = OTHER; note = 2'-O-methylguanosine-3'-phosphate
  modified_base 14: mod_base = OTHER; note = 2'-O-methyluridine-3'-phosphate
  modified_base 15: mod_base = OTHER; note = 2'-O-methylguanosine-3'-phosphate
  modified_base 16: mod_base = OTHER; note = 2'-O-methyluridine-3'-phosphate
  modified_base 17: mod_base = OTHER; note = 2'-O-methyladenosine-3'-phosphate
  modified_base 18: mod_base = OTHER; note = 2'-O-methylcytidine-3'-phosphate
  modified_base 19: mod_base = OTHER; note = 2'-O-methyladenosine-3'-phosphate
  modified_base 20: mod_base = OTHER; note = 2'-O-methyluridine-3'-phosphate
  modified_base 21: mod_base = OTHER; note 2'-O-methyluridine-3'-phosphate-N-[tris(GalNAc-alkyl)-amido decanoyl)]-4-hydroxyprolinol (Hyp-(GalNAc-alkyl)3)
actatatcagtagtgtacatt

SEQ ID NO: 3604 - RNA, 21 nt, synthetic construct
  source 1..21: mol_type = other RNA
  modified_base 1: mod_base = OTHER; note = 2'-O-methyluridine-3'-phosphorothioate
  modified_base 2: mod_base = OTHER; note = 2'-O-methyladenosine-3'- phosphorothioate
  modified_base 3: mod_base = OTHER; note = 2'-O-methyluridine-3'-phosphate
  modified_base 4: mod_base = OTHER; note = 2'-O-methyladenosine-3'-phosphate
  modified_base 5: mod_base = OTHER; note = 2'-O-methyluridine-3'-phosphate
  modified_base 6: mod_base = OTHER; note = 2'-O-methylcytidine-3'-phosphate
  modified_base 7: mod_base = OTHER; note = 2'-fluoroadenosine-3'-phosphate
  modified_base 8: mod_base = OTHER; note = 2'-O-methylguanosine-3'-phosphate
  modified_base 9: mod_base = OTHER; note = 2'-fluorouridine-3'-phosphate
  modified_base 10: mod_base = OTHER; note = 2'-fluoroadenosine-3'-phosphate
  modified_base 11: mod_base = OTHER; note = 2'-fluoroguanosine-3'-phosphate
  modified_base 12: mod_base = OTHER; note = 2'-O-methyluridine-3'-phosphate
  modified_base 13: mod_base = OTHER; note = 2'-O-methylguanosine-3'-phosphate
  modified_base 14: mod_base = OTHER; note = 2'-O-methyluridine-3'-phosphate
  modified_base 15: mod_base = OTHER; note = 2'-O-methyladenosine-3'-phosphate
  modified_base 16: mod_base = OTHER; note = 2'-O-methylcytidine-3'-phosphate
  modified_base 17: mod_base = OTHER; note = 2'-O-methyladenosine-3'-phosphate
  modified_base 18: mod_base = OTHER; note = 2'-O-methyluridine-3'-phosphate
  modified_base 19: mod_base = OTHER; note = 2'-O-methyluridine-3'-phosphate
  modified_base 20: mod_base = OTHER; note = 2'-O-methyladenosine-3'-phosphate
  modified_base 21: mod_base = OTHER; note 2'-O-methyladenosine-3'-phosphate-N-[tris(GalNAc-alkyl)-ami dodecanoyl)]-4-hydroxyprolinol (Hyp-(GalNAc-alkyl)3)
tatatcagtagtgtacattaa

SEQ ID NO: 3605 - RNA, 21 nt, synthetic construct
  source 1..21: mol_type = other RNA
  modified_base 1: mod_base = OTHER; note = 2'-O-methylguanosine-3'- phosphorothioate
  modified_base 2: mod_base = OTHER; note = 2'-O-methyluridine-3'-phosphorothioate
  modified_base 3: mod_base = OTHER; note = 2'-O-methyladenosine-3'-phosphate
  modified_base 4: mod_base = OTHER; note = 2'-O-methyladenosine-3'-phosphate
  modified_base 5: mod_base = OTHER; note = 2'-O-methyluridine-3'-phosphate
  modified_base 6: mod_base = OTHER; note = 2'-O-methyladenosine-3'-phosphate
  modified_base 7: mod_base = OTHER; note = 2'-fluorouridine-3'-phosphate
  modified_base 8: mod_base = OTHER; note = 2'-O-methyluridine-3'-phosphate
  modified_base 9: mod_base = OTHER; note = 2'-fluorouridine-3'-phosphate
  modified_base 10: mod_base = OTHER; note = 2'-fluorouridine-3'-phosphate
  modified_base 11: mod_base = OTHER; note = 2'-fluoroadenosine-3'-phosphate
  modified_base 12: mod_base = OTHER; note = 2'-O-methyladenosine-3'-phosphate
  modified_base 13: mod_base = OTHER; note = 2'-O-methylguanosine-3'-phosphate
  modified_base 14: mod_base = OTHER; note = 2'-O-methyladenosine-3'-phosphate
  modified_base 15: mod_base = OTHER; note = 2'-O-methyluridine-3'-phosphate
  modified_base 16: mod_base = OTHER; note = 2'-O-methylguanosine-3'-phosphate
  modified_base 17: mod_base = OTHER; note = 2'-O-methylguanosine-3'-phosphate
  modified_base 18: mod_base = OTHER; note = 2'-O-methyladenosine-3'-phosphate
  modified_base 19: mod_base = OTHER; note = 2'-O-methylcytidine-3'-phosphate
  modified_base 20: mod_base = OTHER; note = 2'-O-methyluridine-3'-phosphate
  modified_base 21: mod_base = OTHER; note 2'-O-methyladenosine-3'-phosphate-N-[tris(GalNAc-alkyl)-ami dodecanoyl)]-4-hydroxyprolinol (Hyp-(GalNAc-alkyl)3)
gtaatattttaagatggacta

SEQ ID NO: 3606 - RNA, 21 nt, synthetic construct
  source 1..21: mol_type = other RNA
  modified_base 1: mod_base = OTHER; note = 2'-O-methyluridine-3'-phosphorothioate
  modified_base 2: mod_base = OTHER; note = 2'-O-methyluridine-3'-phosphorothioate
  modified_base 3: mod_base = OTHER; note = 2'-O-methyluridine-3'-phosphate
  modified_base 4: mod_base = OTHER; note = 2'-O-methyluridine-3'-phosphate
  modified_base 5: mod_base = OTHER; note = 2'-O-methyladenosine-3'-phosphate
  modified_base 6: mod_base = OTHER; note = 2'-O-methyladenosine-3'-phosphate
  modified_base 7: mod_base = OTHER; note = 2'-fluoroguanosine-3'-phosphate
  modified_base 8: mod_base = OTHER; note = 2'-O-methyladenosine-3'-phosphate
  modified_base 9: mod_base = OTHER; note = 2'-fluorouridine-3'-phosphate
  modified_base 10: mod_base = OTHER; note = 2'-fluoroguanosine-3'-phosphate
  modified_base 11: mod_base = OTHER; note = 2'-fluoroguanosine-3'-phosphate
  modified_base 12: mod_base = OTHER; note = 2'-O-methyladenosine-3'-phosphate
  modified_base 13: mod_base = OTHER; note = 2'-O-methylcytidine-3'-phosphate
  modified_base 14: mod_base = OTHER; note = 2'-O-methyluridine-3'-phosphate
  modified_base 15: mod_base = OTHER; note = 2'-O-methylguanosine-3'-phosphate
  modified_base 16: mod_base = OTHER; note = 2'-O-methylguanosine-3'-phosphate
  modified_base 17: mod_base = OTHER; note = 2'-O-methylguanosine-3'-phosphate
  modified_base 18: mod_base = OTHER; note = 2'-O-methyladenosine-3'-phosphate
  modified_base 19: mod_base = OTHER; note = 2'-O-methyladenosine-3'-phosphate
  modified_base 20: mod_base = OTHER; note = 2'-O-methyladenosine-3'-phosphate
  modified_base 21: mod_base = OTHER; note 2'-O-methyladenosine-3'-phosphate-N-[tris(GalNAc-alkyl)-ami dodecanoyl)]-4-hydroxyprolinol (Hyp-(GalNAc-alkyl)3)
ttttaagatggactgggaaaa

SEQ ID NO: 3607 - RNA, 21 nt, synthetic construct
  source 1..21: mol_type = other RNA
  modified_base 1: mod_base = OTHER; note = 2'-O-methyluridine-3'-phosphorothioate
  modified_base 2: mod_base = OTHER; note = 2'-O-methylguanosine-3'- phosphorothioate
  modified_base 3: mod_base = OTHER; note = 2'-O-methylguanosine-3'-phosphate
  modified_base 4: mod_base = OTHER; note = 2'-O-methyluridine-3'-phosphate
  modified_base 5: mod_base = OTHER; note = 2'-O-methyluridine-3'-phosphate
  modified_base 6: mod_base = OTHER; note = 2'-O-methyladenosine-3'-phosphate
  modified_base 7: mod_base = OTHER; note = 2'-fluoroguanosine-3'-phosphate
  modified_base 8: mod_base = OTHER; note = 2'-O-methyluridine-3'-phosphate
  modified_base 9: mod_base = OTHER; note = 2'-fluoroguanosine-3'-phosphate
  modified_base 10: mod_base = OTHER; note = 2'-fluorouridine-3'-phosphate
  modified_base 11: mod_base = OTHER; note = 2'-fluoroguanosine-3'-phosphate
  modified_base 12: mod_base = OTHER; note = 2'-O-methyladenosine-3'-phosphate
  modified_base 13: mod_base = OTHER; note = 2'-O-methyladenosine-3'-phosphate
  modified_base 14: mod_base = OTHER; note = 2'-O-methyladenosine-3'-phosphate
  modified_base 15: mod_base = OTHER; note = 2'-O-methyluridine-3'-phosphate
  modified_base 16: mod_base = OTHER; note = 2'-O-methyladenosine-3'-phosphate
  modified_base 17: mod_base = OTHER; note = 2'-O-methylguanosine-3'-phosphate
  modified_base 18: mod_base = OTHER; note = 2'-O-methyluridine-3'-phosphate
  modified_base 19: mod_base = OTHER; note = 2'-O-methyluridine-3'-phosphate
  modified_base 20: mod_base = OTHER; note = 2'-O-methylcytidine-3'-phosphate
  modified_base 21: mod_base = OTHER; note 2'-O-methyluridine-3'-phosphate-N-[tris(GalNAc-alkyl)-amido decanoyl)]-4-hydroxyprolinol (Hyp-(GalNAc-alkyl)3)
tggttagtgtgaaatagttct

SEQ ID NO: 3608 - RNA, 21 nt, synthetic construct
  source 1..21: mol_type = other RNA
  modified_base 1: mod_base = OTHER; note = 2'-O-methyluridine-3'-phosphorothioate
  modified_base 2: mod_base = OTHER; note = 2'-O-methyluridine-3'-phosphorothioate
  modified_base 3: mod_base = OTHER; note = 2'-O-methylcytidine-3'-phosphate
  modified_base 4: mod_base = OTHER; note = 2'-O-methyladenosine-3'-phosphate
  modified_base 5: mod_base = OTHER; note = 2'-O-methylcytidine-3'-phosphate
  modified_base 6: mod_base = OTHER; note = 2'-O-methyluridine-3'-phosphate
  modified_base 7: mod_base = OTHER; note = 2'-fluoroguanosine-3'-phosphate
  modified_base 8: mod_base = OTHER; note = 2'-O-methyladenosine-3'-phosphate
  modified_base 9: mod_base = OTHER; note = 2'-fluoroadenosine-3'-phosphate
  modified_base 10: mod_base = OTHER; note = 2'-fluorocytidine-3'-phosphate
  modified_base 11: mod_base = OTHER; note = 2'-fluoroadenosine-3'-phosphate
  modified_base 12: mod_base = OTHER; note = 2'-O-methyluridine-3'-phosphate
  modified_base 13: mod_base = OTHER; note = 2'-O-methylguanosine-3'-phosphate
  modified_base 14: mod_base = OTHER; note = 2'-O-methylcytidine-3'-phosphate
  modified_base 15: mod_base = OTHER; note = 2'-O-methylcytidine-3'-phosphate
  modified_base 16: mod_base = OTHER; note = 2'-O-methyluridine-3'-phosphate
  modified_base 17: mod_base = OTHER; note = 2'-O-methyladenosine-3'-phosphate
  modified_base 18: mod_base = OTHER; note = 2'-O-methylguanosine-3'-phosphate
  modified_base 19: mod_base = OTHER; note = 2'-O-methyluridine-3'-phosphate
  modified_base 20: mod_base = OTHER; note = 2'-O-methylcytidine-3'-phosphate
  modified_base 21: mod_base = OTHER; note 2'-O-methyladenosine-3'-phosphate-N-[tris(GalNAc-alkyl)-ami dodecanoyl)]-4-hydroxyprolinol (Hyp-(GalNAc-alkyl)3)
ttcactgaacatgcctagtca

SEQ ID NO: 3609 - RNA, 21 nt, synthetic construct
  source 1..21: mol_type = other RNA
  modified_base 1: mod_base = OTHER; note = 2'-O-methyladenosine-3'- phosphorothioate
  modified_base 2: mod_base = OTHER; note = 2'-O-methylcytidine-3'- phosphorothioate
  modified_base 3: mod_base = OTHER; note = 2'-O-methylcytidine-3'-phosphate
  modified_base 4: mod_base = OTHER; note = 2'-O-methyladenosine-3'-phosphate
  modified_base 5: mod_base = OTHER; note = 2'-O-methyladenosine-3'-phosphate
  modified_base 6: mod_base = OTHER; note = 2'-O-methylcytidine-3'-phosphate
  modified_base 7: mod_base = OTHER; note = 2'-fluorouridine-3'-phosphate
  modified_base 8: mod_base = OTHER; note = 2'-O-methyladenosine-3'-phosphate
  modified_base 9: mod_base = OTHER; note = 2'-fluorouridine-3'-phosphate
  modified_base 10: mod_base = OTHER; note = 2'-fluorocytidine-3'-phosphate
  modified_base 11: mod_base = OTHER; note = 2'-fluorocytidine-3'-phosphate
  modified_base 12: mod_base = OTHER; note = 2'-O-methyladenosine-3'-phosphate
  modified_base 13: mod_base = OTHER; note = 2'-O-methyladenosine-3'-phosphate
  modified_base 14: mod_base = OTHER; note = 2'-O-methylguanosine-3'-phosphate
  modified_base 15: mod_base = OTHER; note = 2'-O-methyluridine-3'-phosphate
  modified_base 16: mod_base = OTHER; note = 2'-O-methylguanosine-3'-phosphate
  modified_base 17: mod_base = OTHER; note = 2'-O-methyluridine-3'-phosphate
  modified_base 18: mod_base = OTHER; note = 2'-O-methyluridine-3'-phosphate
  modified_base 19: mod_base = OTHER; note = 2'-O-methyladenosine-3'-phosphate
  modified_base 20: mod_base = OTHER; note = 2'-O-methyluridine-3'-phosphate
  modified_base 21: mod_base = OTHER; note 2'-O-methyladenosine-3'-phosphate-N-[tris(GalNAc-alkyl)-ami dodecanoyl)]-4-hydroxyprolinol (Hyp-(GalNAc-alkyl)3)
accaactatccaagtgttata

SEQ ID NO: 3610 - RNA, 21 nt, synthetic construct
  source 1..21: mol_type = other RNA
  modified_base 1: mod_base = OTHER; note = 2'-O-methylcytidine-3'- phosphorothioate
  modified_base 2: mod_base = OTHER; note = 2'-O-methylcytidine-3'- phosphorothioate
  modified_base 3: mod_base = OTHER; note = 2'-O-methyladenosine-3'-phosphate
  modified_base 4: mod_base = OTHER; note = 2'-O-methyladenosine-3'-phosphate
  modified_base 5: mod_base = OTHER; note = 2'-O-methylguanosine-3'-phosphate
  modified_base 6: mod_base = OTHER; note = 2'-O-methyluridine-3'-phosphate
  modified_base 7: mod_base = OTHER; note = 2'-fluoroguanosine-3'-phosphate
  modified_base 8: mod_base = OTHER; note = 2'-O-methyluridine-3'-phosphate
  modified_base 9: mod_base = OTHER; note = 2'-fluorouridine-3'-phosphate
  modified_base 10: mod_base = OTHER; note = 2'-fluoroadenosine-3'-phosphate
  modified_base 11: mod_base = OTHER; note = 2'-fluorouridine-3'-phosphate
  modified_base 12: mod_base = OTHER; note = 2'-O-methyladenosine-3'-phosphate
  modified_base 13: mod_base = OTHER; note = 2'-O-methylcytidine-3'-phosphate
  modified_base 14: mod_base = OTHER; note = 2'-O-methylcytidine-3'-phosphate
  modified_base 15: mod_base = OTHER; note = 2'-O-methyladenosine-3'-phosphate
  modified_base 16: mod_base = OTHER; note = 2'-O-methyladenosine-3'-phosphate
  modified_base 17: mod_base = OTHER; note = 2'-O-methylcytidine-3'-phosphate
  modified_base 18: mod_base = OTHER; note = 2'-O-methyluridine-3'-phosphate
  modified_base 19: mod_base = OTHER; note = 2'-O-methyladenosine-3'-phosphate
  modified_base 20: mod_base = OTHER; note = 2'-O-methyladenosine-3'-phosphate
  modified_base 21: mod_base = OTHER; note 2'-O-methyladenosine-3'-phosphate-N-[tris(GalNAc-alkyl)-ami dodecanoyl)]-4-hydroxyprolinol (Hyp-(GalNAc-alkyl)3)
ccaagtgttataccaactaaa

SEQ ID NO: 3611 - RNA, 21 nt, synthetic construct
  source 1..21: mol_type = other RNA
  modified_base 1: mod_base = OTHER; note = 2'-O-methyluridine-3'-phosphorothioate
  modified_base 2: mod_base = OTHER; note = 2'-O-methyluridine-3'-phosphorothioate
  modified_base 3: mod_base = OTHER; note = 2'-O-methylcytidine-3'-phosphate
  modified_base 4: mod_base = OTHER; note = 2'-O-methylcytidine-3'-phosphate
  modified_base 5: mod_base = OTHER; note = 2'-O-methyluridine-3'-phosphate
  modified_base 6: mod_base = OTHER; note = 2'-O-methyluridine-3'-phosphate
  modified_base 7: mod_base = OTHER; note = 2'-fluorouridine-3'-phosphate
  modified_base 8: mod_base = OTHER; note = 2'-O-methyluridine-3'-phosphate
  modified_base 9: mod_base = OTHER; note = 2'-fluoroguanosine-3'-phosphate
  modified_base 10: mod_base = OTHER; note = 2'-fluoroguanosine-3'-phosphate
  modified_base 11: mod_base = OTHER; note = 2'-fluorouridine-3'-phosphate
  modified_base 12: mod_base = OTHER; note = 2'-O-methyluridine-3'-phosphate
  modified_base 13: mod_base = OTHER; note = 2'-O-methylcytidine-3'-phosphate
  modified_base 14: mod_base = OTHER; note = 2'-O-methylcytidine-3'-phosphate
  modified_base 15: mod_base = OTHER; note = 2'-O-methyladenosine-3'-phosphate
  modified_base 16: mod_base = OTHER; note = 2'-O-methyladenosine-3'-phosphate
  modified_base 17: mod_base = OTHER; note = 2'-O-methylguanosine-3'-phosphate
  modified_base 18: mod_base = OTHER; note = 2'-O-methyluridine-3'-phosphate
  modified_base 19: mod_base = OTHER; note = 2'-O-methylcytidine-3'-phosphate
  modified_base 20: mod_base = OTHER; note = 2'-O-methylcytidine-3'-phosphate
  modified_base 21: mod_base = OTHER; note 2'-O-methyladenosine-3'-phosphate-N-[tris(GalNAc-alkyl)-ami dodecanoyl)]-4-hydroxyprolinol (Hyp-(GalNAc-alkyl)3)
ttccttttggttccaagtcca

SEQ ID NO: 3612 - RNA, 21 nt, synthetic construct
  source 1..21: mol_type = other RNA
  modified_base 1: mod_base = OTHER; note = 2'-O-methylguanosine-3'- phosphorothioate
  modified_base 2: mod_base = OTHER; note = 2'-O-methylcytidine-3'- phosphorothioate
  modified_base 3: mod_base = OTHER; note = 2'-O-methyladenosine-3'-phosphate
  modified_base 4: mod_base = OTHER; note = 2'-O-methylguanosine-3'-phosphate
  modified_base 5: mod_base = OTHER; note = 2'-O-methylcytidine-3'-phosphate
  modified_base 6: mod_base = OTHER; note = 2'-O-methylcytidine-3'-phosphate
  modified_base 7: mod_base = OTHER; note = 2'-fluorouridine-3'-phosphate
  modified_base 8: mod_base = OTHER; note = 2'-O-methyluridine-3'-phosphate
  modified_base 9: mod_base = OTHER; note = 2'-fluorouridine-3'-phosphate
  modified_base 10: mod_base = OTHER; note = 2'-fluorouridine-3'-phosphate
  modified_base 11: mod_base = OTHER; note = 2'-fluorocytidine-3'-phosphate
  modified_base 12: mod_base = OTHER; note = 2'-O-methylcytidine-3'-phosphate
  modified_base 13: mod_base = OTHER; note = 2'-O-methyluridine-3'-phosphate
  modified_base 14: mod_base = OTHER; note = 2'-O-methyluridine-3'-phosphate
  modified_base 15: mod_base = OTHER; note = 2'-O-methyladenosine-3'-phosphate
  modified_base 16: mod_base = OTHER; note = 2'-O-methylguanosine-3'-phosphate
  modified_base 17: mod_base = OTHER; note = 2'-O-methyladenosine-3'-phosphate
  modified_base 18: mod_base = OTHER; note = 2'-O-methyladenosine-3'-phosphate
  modified_base 19: mod_base = OTHER; note = 2'-O-methylcytidine-3'-phosphate
  modified_base 20: mod_base = OTHER; note = 2'-O-methyladenosine-3'-phosphate
  modified_base 21: mod_base = OTHER; note 2'-O-methyladenosine-3'-phosphate-N-[tris(GalNAc-alkyl)-ami dodecanoyl)]-4-hydroxyprolinol (Hyp-(GalNAc-alkyl)3)
gcagccttttccttagaacaa

SEQ ID NO: 3613 - RNA, 21 nt, synthetic construct
  source 1..21: mol_type = other RNA
  modified_base 1: mod_base = OTHER; note = 2'-O-methyladenosine-3'- phosphorothioate
  modified_base 2: mod_base = OTHER; note = 2'-O-methylguanosine-3'- phosphorothioate
  modified_base 3: mod_base = OTHER; note = 2'-O-methyluridine-3'-phosphate
  modified_base 4: mod_base = OTHER; note = 2'-O-methyladenosine-3'-phosphate
  modified_base 5: mod_base = OTHER; note = 2'-O-methyladenosine-3'-phosphate
  modified_base 6: mod_base = OTHER; note = 2'-O-methyluridine-3'-phosphate
  modified_base 7: mod_base = OTHER; note = 2'-fluoroadenosine-3'-phosphate
  modified_base 8: mod_base = OTHER; note = 2'-O-methyluridine-3'-phosphate
  modified_base 9: mod_base = OTHER; note = 2'-fluorouridine-3'-phosphate
  modified_base 10: mod_base = OTHER; note = 2'-fluorouridine-3'-phosphate
  modified_base 11: mod_base = OTHER; note = 2'-fluorouridine-3'-phosphate
  modified_base 12: mod_base = OTHER; note = 2'-O-methyladenosine-3'-phosphate
  modified_base 13: mod_base = OTHER; note = 2'-O-methyladenosine-3'-phosphate
  modified_base 14: mod_base = OTHER; note = 2'-O-methylguanosine-3'-phosphate
  modified_base 15: mod_base = OTHER; note = 2'-O-methyladenosine-3'-phosphate
  modified_base 16: mod_base = OTHER; note = 2'-O-methyluridine-3'-phosphate
  modified_base 17: mod_base = OTHER; note = 2'-O-methylguanosine-3'-phosphate
  modified_base 18: mod_base = OTHER; note = 2'-O-methylguanosine-3'-phosphate
  modified_base 19: mod_base = OTHER; note = 2'-O-methyladenosine-3'-phosphate
  modified_base 20: mod_base = OTHER; note = 2'-O-methylcytidine-3'-phosphate
  modified_base 21: mod_base = OTHER; note 2'-O-methyluridine-3'-phosphate-N-[tris(GalNAc-alkyl)-amido decanoyl)]-4-hydroxyprolinol (Hyp-(GalNAc-alkyl)3)
agtaatattttaagatggact

SEQ ID NO: 3614 - RNA, 21 nt, synthetic construct
  source 1..21: mol_type = other RNA
  modified_base 1: mod_base = OTHER; note = 2'-O-methyladenosine-3'- phosphorothioate
  modified_base 2: mod_base = OTHER; note = 2'-O-methyladenosine-3'- phosphorothioate
  modified_base 3: mod_base = OTHER; note = 2'-O-methyladenosine-3'-phosphate
  modified_base 4: mod_base = OTHER; note = 2'-O-methyladenosine-3'-phosphate
  modified_base 5: mod_base = OTHER; note = 2'-O-methyluridine-3'-phosphate
  modified_base 6: mod_base = OTHER; note = 2'-O-methylcytidine-3'-phosphate
  modified_base 7: mod_base = OTHER; note = 2'-fluorocytidine-3'-phosphate
  modified_base 8: mod_base = OTHER; note = 2'-O-methyladenosine-3'-phosphate
  modified_base 9: mod_base = OTHER; note = 2'-fluorocytidine-3'-phosphate
  modified_base 10: mod_base = OTHER; note = 2'-fluoroadenosine-3'-phosphate
  modified_base 11: mod_base = OTHER; note = 2'-fluoroguanosine-3'-phosphate
  modified_base 12: mod_base = OTHER; note = 2'-O-methylcytidine-3'-phosphate
  modified_base 13: mod_base = OTHER; note = 2'-O-methyluridine-3'-phosphate
  modified_base 14: mod_base = OTHER; note = 2'-O-methyladenosine-3'-phosphate
  modified_base 15: mod_base = OTHER; note = 2'-O-methyluridine-3'-phosphate
  modified_base 16: mod_base = OTHER; note = 2'-O-methyladenosine-3'-phosphate
  modified_base 17: mod_base = OTHER; note = 2'-O-methyluridine-3'-phosphate
  modified_base 18: mod_base = OTHER; note = 2'-O-methylcytidine-3'-phosphate
  modified_base 19: mod_base = OTHER; note = 2'-O-methylcytidine-3'-phosphate
  modified_base 20: mod_base = OTHER; note = 2'-O-methyluridine-3'-phosphate
  modified_base 21: mod_base = OTHER; note 2'-O-methyladenosine-3'-phosphate-N-[tris(GalNAc-alkyl)-ami dodecanoyl)]-4-hydroxyprolinol (Hyp-(GalNAc-alkyl)3)
aaaatccacagctatatccta

SEQ ID NO: 3615 - RNA, 21 nt, synthetic construct
  source 1..21: mol_type = other RNA
  modified_base 1: mod_base = OTHER; note = 2'-O-methyluridine-3'-phosphorothioate
  modified_base 2: mod_base = OTHER; note = 2'-O-methylcytidine-3'- phosphorothioate
  modified_base 3: mod_base = OTHER; note = 2'-O-methylcytidine-3'-phosphate
  modified_base 4: mod_base = OTHER; note = 2'-O-methyluridine-3'-phosphate
  modified_base 5: mod_base = OTHER; note = 2'-O-methyluridine-3'-phosphate
  modified_base 6: mod_base = OTHER; note = 2'-O-methylcytidine-3'-phosphate
  modified_base 7: mod_base = OTHER; note = 2'-fluoroadenosine-3'-phosphate
  modified_base 8: mod_base = OTHER; note = 2'-O-methylcytidine-3'-phosphate
  modified_base 9: mod_base = OTHER; note = 2'-fluorouridine-3'-phosphate
  modified_base 10: mod_base = OTHER; note = 2'-fluoroguanosine-3'-phosphate
  modified_base 11: mod_base = OTHER; note = 2'-fluoroadenosine-3'-phosphate
  modified_base 12: mod_base = OTHER; note = 2'-O-methyladenosine-3'-phosphate
  modified_base 13: mod_base = OTHER; note = 2'-O-methylcytidine-3'-phosphate
  modified_base 14: mod_base = OTHER; note = 2'-O-methyladenosine-3'-phosphate
  modified_base 15: mod_base = OTHER; note = 2'-O-methyluridine-3'-phosphate
  modified_base 16: mod_base = OTHER; note = 2'-O-methylguanosine-3'-phosphate
  modified_base 17: mod_base = OTHER; note = 2'-O-methylcytidine-3'-phosphate
  modified_base 18: mod_base = OTHER; note = 2'-O-methylcytidine-3'-phosphate
  modified_base 19: mod_base = OTHER; note = 2'-O-methyluridine-3'-phosphate
  modified_base 20: mod_base = OTHER; note = 2'-O-methyladenosine-3'-phosphate
  modified_base 21: mod_base = OTHER; note 2'-O-methyladenosine-3'-phosphate-N-[tris(GalNAc-alkyl)-ami dodecanoyl)]-4-hydroxyprolinol (Hyp-(GalNAc-alkyl)3)
tccttcactgaacatgcctaa

SEQ ID NO: 3616 - RNA, 21 nt, synthetic construct
  source 1..21: mol_type = other RNA
  modified_base 1: mod_base = OTHER; note = 2'-O-methylcytidine-3'- phosphorothioate
  modified_base 2: mod_base = OTHER; note = 2'-O-methyladenosine-3'- phosphorothioate
  modified_base 3: mod_base = OTHER; note = 2'-O-methylcytidine-3'-phosphate
  modified_base 4: mod_base = OTHER; note = 2'-O-methyluridine-3'-phosphate
  modified_base 5: mod_base = OTHER; note = 2'-O-methylguanosine-3'-phosphate
  modified_base 6: mod_base = OTHER; note = 2'-O-methyladenosine-3'-phosphate
  modified_base 7: mod_base = OTHER; note = 2'-fluoroadenosine-3'-phosphate
  modified_base 8: mod_base = OTHER; note = 2'-O-methylcytidine-3'-phosphate
  modified_base 9: mod_base = OTHER; note = 2'-fluoroadenosine-3'-phosphate
  modified_base 10: mod_base = OTHER; note = 2'-fluorouridine-3'-phosphate
  modified_base 11: mod_base = OTHER; note = 2'-fluoroguanosine-3'-phosphate
  modified_base 12: mod_base = OTHER; note = 2'-O-methylcytidine-3'-phosphate
  modified_base 13: mod_base = OTHER; note = 2'-O-methylcytidine-3'-phosphate
  modified_base 14: mod_base = OTHER; note = 2'-O-methyluridine-3'-phosphate
  modified_base 15: mod_base = OTHER; note = 2'-O-methyladenosine-3'-phosphate
  modified_base 16: mod_base = OTHER; note = 2'-O-methylguanosine-3'-phosphate
  modified_base 17: mod_base = OTHER; note = 2'-O-methyluridine-3'-phosphate
  modified_base 18: mod_base = OTHER; note = 2'-O-methylcytidine-3'-phosphate
  modified_base 19: mod_base = OTHER; note = 2'-O-methylcytidine-3'-phosphate
  modified_base 20: mod_base = OTHER; note = 2'-O-methyladenosine-3'-phosphate
  modified_base 21: mod_base = OTHER; note 2'-O-methyladenosine-3'-phosphate-N-[tris(GalNAc-alkyl)-ami dodecanoyl)]-4-hydroxyprolinol (Hyp-(GalNAc-alkyl)3)
cactgaacatgcctagtccaa

SEQ ID NO: 3617 - RNA, 21 nt, synthetic construct
  source 1..21: mol_type = other RNA
  modified_base 1: mod_base = OTHER; note = 2'-O-methyladenosine-3'- phosphorothioate
  modified_base 2: mod_base = OTHER; note = 2'-O-methyladenosine-3'- phosphorothioate
  modified_base 3: mod_base = OTHER; note = 2'-O-methylguanosine-3'-phosphate
  modified_base 4: mod_base = OTHER; note = 2'-O-methyluridine-3'-phosphate
  modified_base 5: mod_base = OTHER; note = 2'-O-methylguanosine-3'-phosphate
  modified_base 6: mod_base = OTHER; note = 2'-O-methyluridine-3'-phosphate
  modified_base 7: mod_base = OTHER; note = 2'-fluorouridine-3'-phosphate
  modified_base 8: mod_base = OTHER; note = 2'-O-methyladenosine-3'-phosphate
  modified_base 9: mod_base = OTHER; note = 2'-fluorouridine-3'-phosphate
  modified_base 10: mod_base = OTHER; note = 2'-fluoroadenosine-3'-phosphate
  modified_base 11: mod_base = OTHER; note = 2'-fluorocytidine-3'-phosphate
  modified_base 12: mod_base = OTHER; note = 2'-O-methylcytidine-3'-phosphate
  modified_base 13: mod_base = OTHER; note = 2'-O-methyladenosine-3'-phosphate
  modified_base 14: mod_base = OTHER; note = 2'-O-methyladenosine-3'-phosphate
  modified_base 15: mod_base = OTHER; note = 2'-O-methylcytidine-3'-phosphate
  modified_base 16: mod_base = OTHER; note = 2'-O-methyluridine-3'-phosphate
  modified_base 17: mod_base = OTHER; note = 2'-O-methyladenosine-3'-phosphate
  modified_base 18: mod_base = OTHER; note = 2'-O-methyladenosine-3'-phosphate
  modified_base 19: mod_base = OTHER; note = 2'-O-methyladenosine-3'-phosphate
  modified_base 20: mod_base = OTHER; note = 2'-O-methyladenosine-3'-phosphate
  modified_base 21: mod_base = OTHER; note 2'-O-methylcytidine-3'-phosphate-N-[tris(GalNAc-alkyl)-amid odecanoyl)]-4-hydroxyprolinol (Hyp-(GalNAc-alkyl)3)
aagtgttataccaactaaaac

SEQ ID NO: 3618 - RNA, 21 nt, synthetic construct
  source 1..21: mol_type = other RNA
  modified_base 1: mod_base = OTHER; note = 2'-O-methyluridine-3'-phosphorothioate
  modified_base 2: mod_base = OTHER; note = 2'-O-methyluridine-3'-phosphorothioate
  modified_base 3: mod_base = OTHER; note = 2'-O-methylcytidine-3'-phosphate
  modified_base 4: mod_base = OTHER; note = 2'-O-methylcytidine-3'-phosphate
  modified_base 5: mod_base = OTHER; note = 2'-O-methyladenosine-3'-phosphate
  modified_base 6: mod_base = OTHER; note = 2'-O-methylcytidine-3'-phosphate
  modified_base 7: mod_base = OTHER; note = 2'-fluorocytidine-3'-phosphate
  modified_base 8: mod_base = OTHER; note = 2'-O-methyladenosine-3'-phosphate
  modified_base 9: mod_base = OTHER; note = 2'-fluorouridine-3'-phosphate
  modified_base 10: mod_base = OTHER; note = 2'-fluoroguanosine-3'-phosphate
  modified_base 11: mod_base = OTHER; note = 2'-fluoroadenosine-3'-phosphate
  modified_base 12: mod_base = OTHER; note = 2'-O-methyluridine-3'-phosphate
  modified_base 13: mod_base = OTHER; note = 2'-O-methyluridine-3'-phosphate
  modified_base 14: mod_base = OTHER; note = 2'-O-methyladenosine-3'-phosphate
  modified_base 15: mod_base = OTHER; note = 2'-O-methyladenosine-3'-phosphate
  modified_base 16: mod_base = OTHER; note = 2'-O-methylguanosine-3'-phosphate
  modified_base 17: mod_base = OTHER; note = 2'-O-methylguanosine-3'-phosphate
  modified_base 18: mod_base = OTHER; note = 2'-O-methylguanosine-3'-phosphate
  modified_base 19: mod_base = OTHER; note = 2'-O-methyluridine-3'-phosphate
  modified_base 20: mod_base = OTHER; note = 2'-O-methylcytidine-3'-phosphate
  modified_base 21: mod_base = OTHER; note 2'-O-methyluridine-3'-phosphate-N-[tris(GalNAc-alkyl)-amido decanoyl)]-4-hydroxyprolinol (Hyp-(GalNAc-alkyl)3)
ttccaccatgattaagggtct

SEQ ID NO: 3619 - RNA, 21 nt, synthetic construct
  source 1..21: mol_type = other RNA
  modified_base 1: mod_base = OTHER; note = 2'-O-methylguanosine-3'- phosphorothioate
  modified_base 2: mod_base = OTHER; note = 2'-O-methyladenosine-3'- phosphorothioate
  modified_base 3: mod_base = OTHER; note = 2'-O-methyladenosine-3'-phosphate
  modified_base 4: mod_base = OTHER; note = 2'-O-methylcytidine-3'-phosphate
  modified_base 5: mod_base = OTHER; note = 2'-O-methyladenosine-3'-phosphate
  modified_base 6: mod_base = OTHER; note = 2'-O-methyluridine-3'-phosphate
  modified_base 7: mod_base = OTHER; note = 2'-fluoroguanosine-3'-phosphate
  modified_base 8: mod_base = OTHER; note = 2'-O-methylcytidine-3'-phosphate
  modified_base 9: mod_base = OTHER; note = 2'-fluorocytidine-3'-phosphate
  modified_base 10: mod_base = OTHER; note = 2'-fluorouridine-3'-phosphate
  modified_base 11: mod_base = OTHER; note = 2'-fluoroadenosine-3'-phosphate
  modified_base 12: mod_base = OTHER; note = 2'-O-methylguanosine-3'-phosphate
  modified_base 13: mod_base = OTHER; note = 2'-O-methyluridine-3'-phosphate
  modified_base 14: mod_base = OTHER; note = 2'-O-methylcytidine-3'-phosphate
  modified_base 15: mod_base = OTHER; note = 2'-O-methylcytidine-3'-phosphate
  modified_base 16: mod_base = OTHER; note = 2'-O-methyladenosine-3'-phosphate
  modified_base 17: mod_base = OTHER; note = 2'-O-methyladenosine-3'-phosphate
  modified_base 18: mod_base = OTHER; note = 2'-O-methylcytidine-3'-phosphate
  modified_base 19: mod_base = OTHER; note = 2'-O-methyladenosine-3'-phosphate
  modified_base 20: mod_base = OTHER; note = 2'-O-methyluridine-3'-phosphate
  modified_base 21: mod_base = OTHER; note 2'-O-methyluridine-3'-phosphate-N-[tris(GalNAc-alkyl)-amido decanoyl)]-4-hydroxyprolinol (Hyp-(GalNAc-alkyl)3)
gaacatgcctagtccaacatt

SEQ ID NO: 3620 - RNA, 21 nt, synthetic construct
  source 1..21: mol_type = other RNA
  modified_base 1: mod_base = OTHER; note = 2'-O-methyladenosine-3'- phosphorothioate
  modified_base 2: mod_base = OTHER; note = 2'-O-methyluridine-3'-phosphorothioate
  modified_base 3: mod_base = OTHER; note = 2'-O-methylcytidine-3'-phosphate
  modified_base 4: mod_base = OTHER; note = 2'-O-methyladenosine-3'-phosphate
  modified_base 5: mod_base = OTHER; note = 2'-O-methylguanosine-3'-phosphate
  modified_base 6: mod_base = OTHER; note = 2'-O-methyluridine-3'-phosphate
  modified_base 7: mod_base = OTHER; note = 2'-fluoroadenosine-3'-phosphate
  modified_base 8: mod_base = OTHER; note = 2'-O-methylguanosine-3'-phosphate
  modified_base 9: mod_base = OTHER; note = 2'-fluorouridine-3'-phosphate
  modified_base 10: mod_base = OTHER; note = 2'-fluoroguanosine-3'-phosphate
  modified_base 11: mod_base = OTHER; note = 2'-fluorouridine-3'-phosphate
  modified_base 12: mod_base = OTHER; note = 2'-O-methyladenosine-3'-phosphate
  modified_base 13: mod_base = OTHER; note = 2'-O-methylcytidine-3'-phosphate
  modified_base 14: mod_base = OTHER; note = 2'-O-methyladenosine-3'-phosphate
  modified_base 15: mod_base = OTHER; note = 2'-O-methyluridine-3'-phosphate
  modified_base 16: mod_base = OTHER; note = 2'-O-methyluridine-3'-phosphate
  modified_base 17: mod_base = OTHER; note = 2'-O-methyladenosine-3'-phosphate
  modified_base 18: mod_base = OTHER; note = 2'-O-methylcytidine-3'-phosphate
  modified_base 19: mod_base = OTHER; note = 2'-O-methylcytidine-3'-phosphate
  modified_base 20: mod_base = OTHER; note = 2'-O-methyladenosine-3'-phosphate
  modified_base 21: mod_base = OTHER; note 2'-O-methyluridine-3'-phosphate-N-[tris(GalNAc-alkyl)-amido decanoyl)]-4-hydroxyprolinol (Hyp-(GalNAc-alkyl)3)
atcagtagtgtacattaccat

SEQ ID NO: 3621 - RNA, 21 nt, synthetic construct
  source 1..21: mol_type = other RNA
  modified_base 1: mod_base = OTHER; note = 2'-O-methyladenosine-3'- phosphorothioate
  modified_base 2: mod_base = OTHER; note = 2'-O-methyluridine-3'-phosphorothioate
  modified_base 3: mod_base = OTHER; note = 2'-O-methylcytidine-3'-phosphate
  modified_base 4: mod_base = OTHER; note = 2'-O-methylcytidine-3'-phosphate
  modified_base 5: mod_base = OTHER; note = 2'-O-methyladenosine-3'-phosphate
  modified_base 6: mod_base = OTHER; note = 2'-O-methyladenosine-3'-phosphate
  modified_base 7: mod_base = OTHER; note = 2'-fluoroguanosine-3'-phosphate
  modified_base 8: mod_base = OTHER; note = 2'-O-methyluridine-3'-phosphate
  modified_base 9: mod_base = OTHER; note = 2'-fluoroguanosine-3'-phosphate
  modified_base 10: mod_base = OTHER; note = 2'-fluorouridine-3'-phosphate
  modified_base 11: mod_base = OTHER; note = 2'-fluorouridine-3'-phosphate
  modified_base 12: mod_base = OTHER; note = 2'-O-methyladenosine-3'-phosphate
  modified_base 13: mod_base = OTHER; note = 2'-O-methyluridine-3'-phosphate
  modified_base 14: mod_base = OTHER; note = 2'-O-methyladenosine-3'-phosphate
  modified_base 15: mod_base = OTHER; note = 2'-O-methylcytidine-3'-phosphate
  modified_base 16: mod_base = OTHER; note = 2'-O-methylcytidine-3'-phosphate
  modified_base 17: mod_base = OTHER; note = 2'-O-methyladenosine-3'-phosphate
  modified_base 18: mod_base = OTHER; note = 2'-O-methyladenosine-3'-phosphate
  modified_base 19: mod_base = OTHER; note = 2'-O-methylcytidine-3'-phosphate
  modified_base 20: mod_base = OTHER; note = 2'-O-methyluridine-3'-phosphate
  modified_base 21: mod_base = OTHER; note 2'-O-methyladenosine-3'-phosphate-N-[tris(GalNAc-alkyl)-ami dodecanoyl)]-4-hydroxyprolinol (Hyp-(GalNAc-alkyl)3)
atccaagtgttataccaacta

SEQ ID NO: 3622 - RNA, 21 nt, synthetic construct
  source 1..21: mol_type = other RNA
  modified_base 1: mod_base = OTHER; note = 2'-O-methylcytidine-3'- phosphorothioate
  modified_base 2: mod_base = OTHER; note = 2'-O-methylcytidine-3'- phosphorothioate
  modified_base 3: mod_base = OTHER; note = 2'-O-methyladenosine-3'-phosphate
  modified_base 4: mod_base = OTHER; note = 2'-O-methyladenosine-3'-phosphate
  modified_base 5: mod_base = OTHER; note = 2'-O-methylguanosine-3'-phosphate
  modified_base 6: mod_base = OTHER; note = 2'-O-methyluridine-3'-phosphate
  modified_base 7: mod_base = OTHER; note = 2'-fluorocytidine-3'-phosphate
  modified_base 8: mod_base = OTHER; note = 2'-O-methylcytidine-3'-phosphate
  modified_base 9: mod_base = OTHER; note = 2'-fluoroadenosine-3'-phosphate
  modified_base 10: mod_base = OTHER; note = 2'-fluoroadenosine-3'-phosphate
  modified_base 11: mod_base = OTHER; note = 2'-fluorouridine-3'-phosphate
  modified_base 12: mod_base = OTHER; note = 2'-O-methyladenosine-3'-phosphate
  modified_base 13: mod_base = OTHER; note = 2'-O-methyluridine-3'-phosphate
  modified_base 14: mod_base = OTHER; note = 2'-O-methylguanosine-3'-phosphate
  modified_base 15: mod_base = OTHER; note = 2'-O-methylguanosine-3'-phosphate
  modified_base 16: mod_base = OTHER; note = 2'-O-methylcytidine-3'-phosphate
  modified_base 17: mod_base = OTHER; note = 2'-O-methyladenosine-3'-phosphate
  modified_base 18: mod_base = OTHER; note = 2'-O-methyladenosine-3'-phosphate
  modified_base 19: mod_base = OTHER; note = 2'-O-methylcytidine-3'-phosphate
  modified_base 20: mod_base = OTHER; note = 2'-O-methyluridine-3'-phosphate
  modified_base 21: mod_base = OTHER; note 2'-O-methyladenosine-3'-phosphate-N-[tris(GalNAc-alkyl)-ami dodecanoyl)]-4-hydroxyprolinol (Hyp-(GalNAc-alkyl)3)
ccaagtccaatatggcaacta

SEQ ID NO: 3623 - RNA, 21 nt, synthetic construct
  source 1..21: mol_type = other RNA
  modified_base 1: mod_base = OTHER; note = 2'-O-methyladenosine-3'- phosphorothioate
  modified_base 2: mod_base = OTHER; note = 2'-O-methyluridine-3'-phosphorothioate
  modified_base 3: mod_base = OTHER; note = 2'-O-methylcytidine-3'-phosphate
  modified_base 4: mod_base = OTHER; note = 2'-O-methyluridine-3'-phosphate
  modified_base 5: mod_base = OTHER; note = 2'-O-methylcytidine-3'-phosphate
  modified_base 6: mod_base = OTHER; note = 2'-O-methyladenosine-3'-phosphate
  modified_base 7: mod_base = OTHER; note = 2'-fluoroguanosine-3'-phosphate
  modified_base 8: mod_base = OTHER; note = 2'-O-methyladenosine-3'-phosphate
  modified_base 9: mod_base = OTHER; note = 2'-fluorocytidine-3'-phosphate
  modified_base 10: mod_base = OTHER; note = 2'-fluorocytidine-3'-phosphate
  modified_base 11: mod_base = OTHER; note = 2'-fluorouridine-3'-phosphate
  modified_base 12: mod_base = OTHER; note = 2'-O-methyluridine-3'-phosphate
  modified_base 13: mod_base = OTHER; note = 2'-O-methylguanosine-3'-phosphate
  modified_base 14: mod_base = OTHER; note = 2'-O-methyluridine-3'-phosphate
  modified_base 15: mod_base = OTHER; note = 2'-O-methylguanosine-3'-phosphate
  modified_base 16: mod_base = OTHER; note = 2'-O-methyladenosine-3'-phosphate
  modified_base 17: mod_base = OTHER; note = 2'-O-methyladenosine-3'-phosphate
  modified_base 18: mod_base = OTHER; note = 2'-O-methylguanosine-3'-phosphate
  modified_base 19: mod_base = OTHER; note = 2'-O-methylguanosine-3'-phosphate
  modified_base 20: mod_base = OTHER; note = 2'-O-methyluridine-3'-phosphate
  modified_base 21: mod_base = OTHER; note 2'-O-methyladenosine-3'-phosphate-N-[tris(GalNAc-alkyl)-ami dodecanoyl)]-4-hydroxyprolinol (Hyp-(GalNAc-alkyl)3)
atctcagaccttgtgaaggta

SEQ ID NO: 3624 - RNA, 21 nt, synthetic construct
  source 1..21: mol_type = other RNA
  modified_base 1: mod_base = OTHER; note = 2'-O-methylcytidine-3'- phosphorothioate
  modified_base 2: mod_base = OTHER; note = 2'-O-methyladenosine-3'- phosphorothioate
  modified_base 3: mod_base = OTHER; note = 2'-O-methyluridine-3'-phosphate
  modified_base 4: mod_base = OTHER; note = 2'-O-methyluridine-3'-phosphate
  modified_base 5: mod_base = OTHER; note = 2'-O-methyluridine-3'-phosphate
  modified_base 6: mod_base = OTHER; note = 2'-O-methylcytidine-3'-phosphate
  modified_base 7: mod_base = OTHER; note = 2'-fluoroadenosine-3'-phosphate
  modified_base 8: mod_base = OTHER; note = 2'-O-methylcytidine-3'-phosphate
  modified_base 9: mod_base = OTHER; note = 2'-fluorouridine-3'-phosphate
  modified_base 10: mod_base = OTHER; note = 2'-fluoroguanosine-3'-phosphate
  modified_base 11: mod_base = OTHER; note = 2'-fluorouridine-3'-phosphate
  modified_base 12: mod_base = OTHER; note = 2'-O-methylcytidine-3'-phosphate
  modified_base 13: mod_base = OTHER; note = 2'-O-methyluridine-3'-phosphate
  modified_base 14: mod_base = OTHER; note = 2'-O-methyladenosine-3'-phosphate
  modified_base 15: mod_base = OTHER; note = 2'-O-methylguanosine-3'-phosphate
  modified_base 16: mod_base = OTHER; note = 2'-O-methylguanosine-3'-phosphate
  modified_base 17: mod_base = OTHER; note = 2'-O-methylcytidine-3'-phosphate
  modified_base 18: mod_base = OTHER; note = 2'-O-methyluridine-3'-phosphate
  modified_base 19: mod_base = OTHER; note = 2'-O-methyladenosine-3'-phosphate
  modified_base 20: mod_base = OTHER; note = 2'-O-methylcytidine-3'-phosphate
  modified_base 21: mod_base = OTHER; note 2'-O-methyladenosine-3'-phosphate-N-[tris(GalNAc-alkyl)-ami dodecanoyl)]-4-hydroxyprolinol (Hyp-(GalNAc-alkyl)3)
catttcactgtctaggctaca

SEQ ID NO: 3625 - RNA, 21 nt, synthetic construct
  source 1..21: mol_type = other RNA
  modified_base 1: mod_base = OTHER; note = 2'-O-methylcytidine-3'- phosphorothioate
  modified_base 2: mod_base = OTHER; note = 2'-O-methylcytidine-3'- phosphorothioate
  modified_base 3: mod_base = OTHER; note = 2'-O-methyladenosine-3'-phosphate
  modified_base 4: mod_base = OTHER; note = 2'-O-methylcytidine-3'-phosphate
  modified_base 5: mod_base = OTHER; note = 2'-O-methyladenosine-3'-phosphate
  modified_base 6: mod_base = OTHER; note = 2'-O-methylguanosine-3'-phosphate
  modified_base 7: mod_base = OTHER; note = 2'-fluorocytidine-3'-phosphate
  modified_base 8: mod_base = OTHER; note = 2'-O-methyluridine-3'-phosphate
  modified_base 9: mod_base = OTHER; note = 2'-fluoroadenosine-3'-phosphate
  modified_base 10: mod_base = OTHER; note = 2'-fluorouridine-3'-phosphate
  modified_base 11: mod_base = OTHER; note = 2'-fluoroadenosine-3'-phosphate
  modified_base 12: mod_base = OTHER; note = 2'-O-methyluridine-3'-phosphate
  modified_base 13: mod_base = OTHER; note = 2'-O-methylcytidine-3'-phosphate
  modified_base 14: mod_base = OTHER; note = 2'-O-methylcytidine-3'-phosphate
  modified_base 15: mod_base = OTHER; note = 2'-O-methyluridine-3'-phosphate
  modified_base 16: mod_base = OTHER; note = 2'-O-methylguanosine-3'-phosphate
  modified_base 17: mod_base = OTHER; note = 2'-O-methyladenosine-3'-phosphate
  modified_base 18: mod_base = OTHER; note = 2'-O-methyluridine-3'-phosphate
  modified_base 19: mod_base = OTHER; note = 2'-O-methylguanosine-3'-phosphate
  modified_base 20: mod_base = OTHER; note = 2'-O-methylcytidine-3'-phosphate
  modified_base 21: mod_base = OTHER; note 2'-O-methyluridine-3'-phosphate-N-[tris(GalNAc-alkyl)-amido decanoyl)]-4-hydroxyprolinol (Hyp-(GalNAc-alkyl)3)
ccacagctatatcctgatgct

SEQ ID NO: 3626 - RNA, 21 nt, synthetic construct
  source 1..21: mol_type = other RNA
  modified_base 1: mod_base = OTHER; note = 2'-O-methylcytidine-3'- phosphorothioate
  modified_base 2: mod_base = OTHER; note = 2'-O-methyluridine-3'-phosphorothioate
  modified_base 3: mod_base = OTHER; note = 2'-O-methyluridine-3'-phosphate
  modified_base 4: mod_base = OTHER; note = 2'-O-methylcytidine-3'-phosphate
  modified_base 5: mod_base = OTHER; note = 2'-O-methyladenosine-3'-phosphate
  modified_base 6: mod_base = OTHER; note = 2'-O-methylcytidine-3'-phosphate
  modified_base 7: mod_base = OTHER; note = 2'-fluorouridine-3'-phosphate
  modified_base 8: mod_base = OTHER; note = 2'-O-methylguanosine-3'-phosphate
  modified_base 9: mod_base = OTHER; note = 2'-fluoroadenosine-3'-phosphate
  modified_base 10: mod_base = OTHER; note = 2'-fluoroadenosine-3'-phosphate
  modified_base 11: mod_base = OTHER; note = 2'-fluorocytidine-3'-phosphate
  modified_base 12: mod_base = OTHER; note = 2'-O-methyladenosine-3'-phosphate
  modified_base 13: mod_base = OTHER; note = 2'-O-methyluridine-3'-phosphate
  modified_base 14: mod_base = OTHER; note = 2'-O-methylguanosine-3'-phosphate
  modified_base 15: mod_base = OTHER; note = 2'-O-methylcytidine-3'-phosphate
  modified_base 16: mod_base = OTHER; note = 2'-O-methylcytidine-3'-phosphate
  modified_base 17: mod_base = OTHER; note = 2'-O-methyluridine-3'-phosphate
  modified_base 18: mod_base = OTHER; note = 2'-O-methyladenosine-3'-phosphate
  modified_base 19: mod_base = OTHER; note = 2'-O-methylguanosine-3'-phosphate
  modified_base 20: mod_base = OTHER; note = 2'-O-methyluridine-3'-phosphate
  modified_base 21: mod_base = OTHER; note 2'-O-methyladenosine-3'-phosphate-N-[tris(GalNAc-alkyl)-ami dodecanoyl)]-4-hydroxyprolinol (Hyp-(GalNAc-alkyl)3)
cttcactgaacatgcctagta

SEQ ID NO: 3627 - RNA, 21 nt, synthetic construct
  source 1..21: mol_type = other RNA
  modified_base 1: mod_base = OTHER; note = 2'-O-methylguanosine-3'- phosphorothioate
  modified_base 2: mod_base = OTHER; note = 2'-O-methyluridine-3'-phosphorothioate
  modified_base 3: mod_base = OTHER; note = 2'-O-methylguanosine-3'-phosphate
  modified_base 4: mod_base = OTHER; note = 2'-O-methylguanosine-3'-phosphate
  modified_base 5: mod_base = OTHER; note = 2'-O-methyluridine-3'-phosphate
  modified_base 6: mod_base = OTHER; note = 2'-O-methyluridine-3'-phosphate
  modified_base 7: mod_base = OTHER; note = 2'-fluoroguanosine-3'-phosphate
  modified_base 8: mod_base = OTHER; note = 2'-O-methyladenosine-3'-phosphate
  modified_base 9: mod_base = OTHER; note = 2'-fluoroguanosine-3'-phosphate
  modified_base 10: mod_base = OTHER; note = 2'-fluoroadenosine-3'-phosphate
  modified_base 11: mod_base = OTHER; note = 2'-fluoroguanosine-3'-phosphate
  modified_base 12: mod_base = OTHER; note = 2'-O-methyluridine-3'-phosphate
  modified_base 13: mod_base = OTHER; note = 2'-O-methylguanosine-3'-phosphate
  modified_base 14: mod_base = OTHER; note = 2'-O-methylcytidine-3'-phosphate
  modified_base 15: mod_base = OTHER; note = 2'-O-methyluridine-3'-phosphate
  modified_base 16: mod_base = OTHER; note = 2'-O-methyluridine-3'-phosphate
  modified_base 17: mod_base = OTHER; note = 2'-O-methyladenosine-3'-phosphate
  modified_base 18: mod_base = OTHER; note = 2'-O-methyluridine-3'-phosphate
  modified_base 19: mod_base = OTHER; note = 2'-O-methylguanosine-3'-phosphate
  modified_base 20: mod_base = OTHER; note = 2'-O-methyladenosine-3'-phosphate
  modified_base 21: mod_base = OTHER; note 2'-O-methyladenosine-3'-phosphate-N-[tris(GalNAc-alkyl)-ami dodecanoyl)]-4-hydroxyprolinol (Hyp-(GalNAc-alkyl)3)
gtggttgagagtgcttatgaa

SEQ ID NO: 3628 - RNA, 21 nt, synthetic construct
  source 1..21: mol_type = other RNA
  modified_base 1: mod_base = OTHER; note = 2'-O-methylcytidine-3'- phosphorothioate
  modified_base 2: mod_base = OTHER; note = 2'-O-methyladenosine-3'- phosphorothioate
  modified_base 3: mod_base = OTHER; note = 2'-O-methyladenosine-3'-phosphate
  modified_base 4: mod_base = OTHER; note = 2'-O-methyladenosine-3'-phosphate
  modified_base 5: mod_base = OTHER; note = 2'-O-methylcytidine-3'-phosphate
  modified_base 6: mod_base = OTHER; note = 2'-O-methyluridine-3'-phosphate
  modified_base 7: mod_base = OTHER; note = 2'-fluorocytidine-3'-phosphate
  modified_base 8: mod_base = OTHER; note = 2'-O-methyladenosine-3'-phosphate
  modified_base 9: mod_base = OTHER; note = 2'-fluoroadenosine-3'-phosphate
  modified_base 10: mod_base = OTHER; note = 2'-fluoroadenosine-3'-phosphate
  modified_base 11: mod_base = OTHER; note = 2'-fluoroguanosine-3'-phosphate
  modified_base 12: mod_base = OTHER; note = 2'-O-methylguanosine-3'-phosphate
  modified_base 13: mod_base = OTHER; note = 2'-O-methylcytidine-3'-phosphate
  modified_base 14: mod_base = OTHER; note = 2'-O-methyluridine-3'-phosphate
  modified_base 15: mod_base = OTHER; note = 2'-O-methyladenosine-3'-phosphate
  modified_base 16: mod_base = OTHER; note = 2'-O-methylcytidine-3'-phosphate
  modified_base 17: mod_base = OTHER; note = 2'-O-methyladenosine-3'-phosphate
  modified_base 18: mod_base = OTHER; note = 2'-O-methylcytidine-3'-phosphate
  modified_base 19: mod_base = OTHER; note = 2'-O-methyladenosine-3'-phosphate
  modified_base 20: mod_base = OTHER; note = 2'-O-methyluridine-3'-phosphate
  modified_base 21: mod_base = OTHER; note 2'-O-methyladenosine-3'-phosphate-N-[tris(GalNAc-alkyl)-ami dodecanoyl)]-4-hydroxyprolinol (Hyp-(GalNAc-alkyl)3)
caaactcaaaggctacacata

SEQ ID NO: 3629 - RNA, 21 nt, synthetic construct
  source 1..21: mol_type = other RNA
  modified_base 1: mod_base = OTHER; note = 2'-O-methyladenosine-3'- phosphorothioate
  modified_base 2: mod_base = OTHER; note = 2'-O-methyluridine-3'-phosphorothioate
  modified_base 3: mod_base = OTHER; note = 2'-O-methyladenosine-3'-phosphate
  modified_base 4: mod_base = OTHER; note = 2'-O-methyluridine-3'-phosphate
  modified_base 5: mod_base = OTHER; note = 2'-O-methylcytidine-3'-phosphate
  modified_base 6: mod_base = OTHER; note = 2'-O-methyladenosine-3'-phosphate
  modified_base 7: mod_base = OTHER; note = 2'-fluoroguanosine-3'-phosphate
  modified_base 8: mod_base = OTHER; note = 2'-O-methyluridine-3'-phosphate
  modified_base 9: mod_base = OTHER; note = 2'-fluoroadenosine-3'-phosphate
  modified_base 10: mod_base = OTHER; note = 2'-fluoroguanosine-3'-phosphate
  modified_base 11: mod_base = OTHER; note = 2'-fluorouridine-3'-phosphate
  modified_base 12: mod_base = OTHER; note = 2'-O-methylguanosine-3'-phosphate
  modified_base 13: mod_base = OTHER; note = 2'-O-methyluridine-3'-phosphate
  modified_base 14: mod_base = OTHER; note = 2'-O-methyladenosine-3'-phosphate
  modified_base 15: mod_base = OTHER; note = 2'-O-methylcytidine-3'-phosphate
  modified_base 16: mod_base = OTHER; note = 2'-O-methyladenosine-3'-phosphate
  modified_base 17: mod_base = OTHER; note = 2'-O-methyluridine-3'-phosphate
  modified_base 18: mod_base = OTHER; note = 2'-O-methyluridine-3'-phosphate
  modified_base 19: mod_base = OTHER; note = 2'-O-methyladenosine-3'-phosphate
  modified_base 20: mod_base = OTHER; note = 2'-O-methylcytidine-3'-phosphate
  modified_base 21: mod_base = OTHER; note 2'-O-methyladenosine-3'-phosphate-N-[tris(GalNAc-alkyl)-ami dodecanoyl)]-4-hydroxyprolinol (Hyp-(GalNAc-alkyl)3)
atatcagtagtgtacattaca

SEQ ID NO: 3630 - RNA, 21 nt, synthetic construct
  source 1..21: mol_type = other RNA
  modified_base 1: mod_base = OTHER; note = 2'-O-methylcytidine-3'- phosphorothioate
  modified_base 2: mod_base = OTHER; note = 2'-O-methyladenosine-3'- phosphorothioate
  modified_base 3: mod_base = OTHER; note = 2'-O-methyladenosine-3'-phosphate
  modified_base 4: mod_base = OTHER; note = 2'-O-methylcytidine-3'-phosphate
  modified_base 5: mod_base = OTHER; note = 2'-O-methylcytidine-3'-phosphate
  modified_base 6: mod_base = OTHER; note = 2'-O-methyladenosine-3'-phosphate
  modified_base 7: mod_base = OTHER; note = 2'-fluoroadenosine-3'-phosphate
  modified_base 8: mod_base = OTHER; note = 2'-O-methylcytidine-3'-phosphate
  modified_base 9: mod_base = OTHER; note = 2'-fluorouridine-3'-phosphate
  modified_base 10: mod_base = OTHER; note = 2'-fluoroadenosine-3'-phosphate
  modified_base 11: mod_base = OTHER; note = 2'-fluorouridine-3'-phosphate
  modified_base 12: mod_base = OTHER; note = 2'-O-methylcytidine-3'-phosphate
  modified_base 13: mod_base = OTHER; note = 2'-O-methylcytidine-3'-phosphate
  modified_base 14: mod_base = OTHER; note = 2'-O-methyladenosine-3'-phosphate
  modified_base 15: mod_base = OTHER; note = 2'-O-methyladenosine-3'-phosphate
  modified_base 16: mod_base = OTHER; note = 2'-O-methylguanosine-3'-phosphate
  modified_base 17: mod_base = OTHER; note = 2'-O-methyluridine-3'-phosphate
  modified_base 18: mod_base = OTHER; note = 2'-O-methylguanosine-3'-phosphate
  modified_base 19: mod_base = OTHER; note = 2'-O-methyluridine-3'-phosphate
  modified_base 20: mod_base = OTHER; note = 2'-O-methyluridine-3'-phosphate
  modified_base 21: mod_base = OTHER; note 2'-O-methyladenosine-3'-phosphate-N-[tris(GalNAc-alkyl)-ami dodecanoyl)]-4-hydroxyprolinol (Hyp-(GalNAc-alkyl)3)
caaccaactatccaagtgtta

SEQ ID NO: 3631 - RNA, 21 nt, synthetic construct
  source 1..21: mol_type = other RNA
  modified_base 1: mod_base = OTHER; note = 2'-O-methyluridine-3'-phosphorothioate
  modified_base 2: mod_base = OTHER; note = 2'-O-methylcytidine-3'- phosphorothioate
  modified_base 3: mod_base = OTHER; note = 2'-O-methyladenosine-3'-phosphate
  modified_base 4: mod_base = OTHER; note = 2'-O-methyluridine-3'-phosphate
  modified_base 5: mod_base = OTHER; note = 2'-O-methylcytidine-3'-phosphate
  modified_base 6: mod_base = OTHER; note = 2'-O-methylguanosine-3'-phosphate
  modified_base 7: mod_base = OTHER; note = 2'-fluoroadenosine-3'-phosphate
  modified_base 8: mod_base = OTHER; note = 2'-O-methyladenosine-3'-phosphate
  modified_base 9: mod_base = OTHER; note = 2'-fluoroguanosine-3'-phosphate
  modified_base 10: mod_base = OTHER; note = 2'-fluoroadenosine-3'-phosphate
  modified_base 11: mod_base = OTHER; note = 2'-fluorocytidine-3'-phosphate
  modified_base 12: mod_base = OTHER; note = 2'-O-methyladenosine-3'-phosphate
  modified_base 13: mod_base = OTHER; note = 2'-O-methyladenosine-3'-phosphate
  modified_base 14: mod_base = OTHER; note = 2'-O-methyladenosine-3'-phosphate
  modified_base 15: mod_base = OTHER; note = 2'-O-methyluridine-3'-phosphate
  modified_base 16: mod_base = OTHER; note = 2'-O-methyluridine-3'-phosphate
  modified_base 17: mod_base = OTHER; note = 2'-O-methylguanosine-3'-phosphate
  modified_base 18: mod_base = OTHER; note = 2'-O-methyladenosine-3'-phosphate
  modified_base 19: mod_base = OTHER; note = 2'-O-methyladenosine-3'-phosphate
  modified_base 20: mod_base = OTHER; note = 2'-O-methylguanosine-3'-phosphate
  modified_base 21: mod_base = OTHER; note 2'-O-methyladenosine-3'-phosphate-N-[tris(GalNAc-alkyl)-ami dodecanoyl)]-4-hydroxyprolinol (Hyp-(GalNAc-alkyl)3)
tcatcgaagacaaattgaaga

SEQ ID NO: 3632 - RNA, 21 nt, synthetic construct
  source 1..21: mol_type = other RNA
  modified_base 1: mod_base = OTHER; note = 2'-O-methylguanosine-3'- phosphorothioate
  modified_base 2: mod_base = OTHER; note = 2'-O-methylcytidine-3'- phosphorothioate
  modified_base 3: mod_base = OTHER; note = 2'-O-methyladenosine-3'-phosphate
  modified_base 4: mod_base = OTHER; note = 2'-O-methylguanosine-3'-phosphate
  modified_base 5: mod_base = OTHER; note = 2'-O-methyladenosine-3'-phosphate
  modified_base 6: mod_base = OTHER; note = 2'-O-methyluridine-3'-phosphate
  modified_base 7: mod_base = OTHER; note = 2'-fluorouridine-3'-phosphate
  modified_base 8: mod_base = OTHER; note = 2'-O-methyluridine-3'-phosphate
  modified_base 9: mod_base = OTHER; note = 2'-fluoroguanosine-3'-phosphate
  modified_base 10: mod_base = OTHER; note = 2'-fluoroguanosine-3'-phosphate
  modified_base 11: mod_base = OTHER; note = 2'-fluorocytidine-3'-phosphate
  modified_base 12: mod_base = OTHER; note = 2'-O-methyladenosine-3'-phosphate
  modified_base 13: mod_base = OTHER; note = 2'-O-methylguanosine-3'-phosphate
  modified_base 14: mod_base = OTHER; note = 2'-O-methyladenosine-3'-phosphate
  modified_base 15: mod_base = OTHER; note = 2'-O-methylguanosine-3'-phosphate
  modified_base 16: mod_base = OTHER; note = 2'-O-methyladenosine-3'-phosphate
  modified_base 17: mod_base = OTHER; note = 2'-O-methylguanosine-3'-phosphate
  modified_base 18: mod_base = OTHER; note = 2'-O-methyluridine-3'-phosphate
  modified_base 19: mod_base = OTHER; note = 2'-O-methyladenosine-3'-phosphate
  modified_base 20: mod_base = OTHER; note = 2'-O-methyluridine-3'-phosphate
  modified_base 21: mod_base = OTHER; note 2'-O-methyladenosine-3'-phosphate-N-[tris(GalNAc-alkyl)-ami dodecanoyl)]-4-hydroxyprolinol (Hyp-(GalNAc-alkyl)3)
gcagatttggcagagagtata

SEQ ID NO: 3633 - RNA, 21 nt, synthetic construct
  source 1..21: mol_type = other RNA
  modified_base 1: mod_base = OTHER; note = 2'-O-methylcytidine-3'- phosphorothioate
  modified_base 2: mod_base = OTHER; note = 2'-O-methyluridine-3'-phosphorothioate
  modified_base 3: mod_base = OTHER; note = 2'-O-methylcytidine-3'-phosphate
  modified_base 4: mod_base = OTHER; note = 2'-O-methylcytidine-3'-phosphate
  modified_base 5: mod_base = OTHER; note = 2'-O-methyluridine-3'-phosphate
  modified_base 6: mod_base = OTHER; note = 2'-O-methyluridine-3'-phosphate
  modified_base 7: mod_base = OTHER; note = 2'-fluorocytidine-3'-phosphate
  modified_base 8: mod_base = OTHER; note = 2'-O-methyladenosine-3'-phosphate
  modified_base 9: mod_base = OTHER; note = 2'-fluorocytidine-3'-phosphate
  modified_base 10: mod_base = OTHER; note = 2'-fluorouridine-3'-phosphate
  modified_base 11: mod_base = OTHER; note = 2'-fluoroguanosine-3'-phosphate
  modified_base 12: mod_base = OTHER; note = 2'-O-methyladenosine-3'-phosphate
  modified_base 13: mod_base = OTHER; note = 2'-O-methyladenosine-3'-phosphate
  modified_base 14: mod_base = OTHER; note = 2'-O-methylcytidine-3'-phosphate
  modified_base 15: mod_base = OTHER; note = 2'-O-methyladenosine-3'-phosphate
  modified_base 16: mod_base = OTHER; note = 2'-O-methyluridine-3'-phosphate
  modified_base 17: mod_base = OTHER; note = 2'-O-methylguanosine-3'-phosphate
  modified_base 18: mod_base = OTHER; note = 2'-O-methylcytidine-3'-phosphate
  modified_base 19: mod_base = OTHER; note = 2'-O-methylcytidine-3'-phosphate
  modified_base 20: mod_base = OTHER; note = 2'-O-methyluridine-3'-phosphate
  modified_base 21: mod_base = OTHER; note 2'-O-methyladenosine-3'-phosphate-N-[tris(GalNAc-alkyl)-ami dodecanoyl)]-4-hydroxyprolinol (Hyp-(GalNAc-alkyl)3)
ctccttcactgaacatgccta

SEQ ID NO: 3634 - RNA, 21 nt, synthetic construct
  source 1..21: mol_type = other RNA
  modified_base 1: mod_base = OTHER; note = 2'-O-methylcytidine-3'- phosphorothioate
  modified_base 2: mod_base = OTHER; note = 2'-O-methyladenosine-3'- phosphorothioate
  modified_base 3: mod_base = OTHER; note = 2'-O-methyluridine-3'-phosphate
  modified_base 4: mod_base = OTHER; note = 2'-O-methylguanosine-3'-phosphate
  modified_base 5: mod_base = OTHER; note = 2'-O-methylcytidine-3'-phosphate
  modified_base 6: mod_base = OTHER; note = 2'-O-methylcytidine-3'-phosphate
  modified_base 7: mod_base = OTHER; note = 2'-fluorouridine-3'-phosphate
  modified_base 8: mod_base = OTHER; note = 2'-O-methyladenosine-3'-phosphate
  modified_base 9: mod_base = OTHER; note = 2'-fluoroguanosine-3'-phosphate
  modified_base 10: mod_base = OTHER; note = 2'-fluorouridine-3'-phosphate
  modified_base 11: mod_base = OTHER; note = 2'-fluorocytidine-3'-phosphate
  modified_base 12: mod_base = OTHER; note = 2'-O-methylcytidine-3'-phosphate
  modified_base 13: mod_base = OTHER; note = 2'-O-methyladenosine-3'-phosphate
  modified_base 14: mod_base = OTHER; note = 2'-O-methyladenosine-3'-phosphate
  modified_base 15: mod_base = OTHER; note = 2'-O-methylcytidine-3'-phosphate
  modified_base 16: mod_base = OTHER; note = 2'-O-methyladenosine-3'-phosphate
  modified_base 17: mod_base = OTHER; note = 2'-O-methyluridine-3'-phosphate
  modified_base 18: mod_base = OTHER; note = 2'-O-methyluridine-3'-phosphate
  modified_base 19: mod_base = OTHER; note = 2'-O-methyluridine-3'-phosphate
  modified_base 20: mod_base = OTHER; note = 2'-O-methyluridine-3'-phosphate
  modified_base 21: mod_base = OTHER; note 2'-O-methyluridine-3'-phosphate-N-[tris(GalNAc-alkyl)-amido decanoyl)]-4-hydroxyprolinol (Hyp-(GalNAc-alkyl)3)
catgcctagtccaacattttt

SEQ ID NO: 3635 - RNA, 21 nt, synthetic construct
  source 1..21: mol_type = other RNA
  modified_base 1: mod_base = OTHER; note = 2'-O-methyluridine-3'-phosphorothioate
  modified_base 2: mod_base = OTHER; note = 2'-O-methylguanosine-3'- phosphorothioate
  modified_base 3: mod_base = OTHER; note = 2'-O-methylcytidine-3'-phosphate
  modified_base 4: mod_base = OTHER; note = 2'-O-methylcytidine-3'-phosphate
  modified_base 5: mod_base = OTHER; note = 2'-O-methyladenosine-3'-phosphate
  modified_base 6: mod_base = OTHER; note = 2'-O-methyluridine-3'-phosphate
  modified_base 7: mod_base = OTHER; note = 2'-fluorocytidine-3'-phosphate
  modified_base 8: mod_base = OTHER; note = 2'-O-methyladenosine-3'-phosphate
  modified_base 9: mod_base = OTHER; note = 2'-fluoroguanosine-3'-phosphate
  modified_base 10: mod_base = OTHER; note = 2'-fluorouridine-3'-phosphate
  modified_base 11: mod_base = OTHER; note = 2'-fluoroadenosine-3'-phosphate
  modified_base 12: mod_base = OTHER; note = 2'-O-methyluridine-3'-phosphate
  modified_base 13: mod_base = OTHER; note = 2'-O-methylcytidine-3'-phosphate
  modified_base 14: mod_base = OTHER; note = 2'-O-methyluridine-3'-phosphate
  modified_base 15: mod_base = OTHER; note = 2'-O-methyluridine-3'-phosphate
  modified_base 16: mod_base = OTHER; note = 2'-O-methyladenosine-3'-phosphate
  modified_base 17: mod_base = OTHER; note = 2'-O-methyladenosine-3'-phosphate
  modified_base 18: mod_base = OTHER; note = 2'-O-methyluridine-3'-phosphate
  modified_base 19: mod_base = OTHER; note = 2'-O-methylguanosine-3'-phosphate
  modified_base 20: mod_base = OTHER; note = 2'-O-methyladenosine-3'-phosphate
  modified_base 21: mod_base = OTHER; note 2'-O-methyladenosine-3'-phosphate-N-[tris(GalNAc-alkyl)-ami dodecanoyl)]-4-hydroxyprolinol (Hyp-(GalNAc-alkyl)3)
tgccatcagtatcttaatgaa

SEQ ID NO: 3636 - RNA, 21 nt, synthetic construct
  source 1..21: mol_type = other RNA
  modified_base 1: mod_base = OTHER; note = 2'-O-methylguanosine-3'- phosphorothioate
  modified_base 2: mod_base = OTHER; note = 2'-O-methylcytidine-3'- phosphorothioate
  modified_base 3: mod_base = OTHER; note = 2'-O-methylcytidine-3'-phosphate
  modified_base 4: mod_base = OTHER; note = 2'-O-methyladenosine-3'-phosphate
  modified_base 5: mod_base = OTHER; note = 2'-O-methyluridine-3'-phosphate
  modified_base 6: mod_base = OTHER; note = 2'-O-methylcytidine-3'-phosphate
  modified_base 7: mod_base = OTHER; note = 2'-fluoroadenosine-3'-phosphate
  modified_base 8: mod_base = OTHER; note = 2'-O-methylguanosine-3'-phosphate
  modified_base 9: mod_base = OTHER; note = 2'-fluorouridine-3'-phosphate
  modified_base 10: mod_base = OTHER; note = 2'-fluoroadenosine-3'-phosphate
  modified_base 11: mod_base = OTHER; note = 2'-fluorouridine-3'-phosphate
  modified_base 12: mod_base = OTHER; note = 2'-O-methylcytidine-3'-phosphate
  modified_base 13: mod_base = OTHER; note = 2'-O-methyluridine-3'-phosphate
  modified_base 14: mod_base = OTHER; note = 2'-O-methyluridine-3'-phosphate
  modified_base 15: mod_base = OTHER; note = 2'-O-methyladenosine-3'-phosphate
  modified_base 16: mod_base = OTHER; note = 2'-O-methyladenosine-3'-phosphate
  modified_base 17: mod_base = OTHER; note = 2'-O-methyluridine-3'-phosphate
  modified_base 18: mod_base = OTHER; note = 2'-O-methylguanosine-3'-phosphate
  modified_base 19: mod_base = OTHER; note = 2'-O-methyladenosine-3'-phosphate
  modified_base 20: mod_base = OTHER; note = 2'-O-methyladenosine-3'-phosphate
  modified_base 21: mod_base = OTHER; note 2'-O-methyladenosine-3'-phosphate-N-[tris(GalNAc-alkyl)-ami dodecanoyl)]-4-hydroxyprolinol (Hyp-(GalNAc-alkyl)3)
gccatcagtatcttaatgaaa

SEQ ID NO: 3637 - RNA, 21 nt, synthetic construct
  source 1..21: mol_type = other RNA
  modified_base 1: mod_base = OTHER; note = 2'-O-methyluridine-3'-phosphorothioate
  modified_base 2: mod_base = OTHER; note = 2'-O-methyluridine-3'-phosphorothioate
  modified_base 3: mod_base = OTHER; note = 2'-O-methyladenosine-3'-phosphate
  modified_base 4: mod_base = OTHER; note = 2'-O-methylguanosine-3'-phosphate
  modified_base 5: mod_base = OTHER; note = 2'-O-methyladenosine-3'-phosphate
  modified_base 6: mod_base = OTHER; note = 2'-O-methyladenosine-3'-phosphate
  modified_base 7: mod_base = OTHER; note = 2'-fluorocytidine-3'-phosphate
  modified_base 8: mod_base = OTHER; note = 2'-O-methyladenosine-3'-phosphate
  modified_base 9: mod_base = OTHER; note = 2'-fluorocytidine-3'-phosphate
  modified_base 10: mod_base = OTHER; note = 2'-fluorocytidine-3'-phosphate
  modified_base 11: mod_base = OTHER; note = 2'-fluoroadenosine-3'-phosphate
  modified_base 12: mod_base = OTHER; note = 2'-O-methyladenosine-3'-phosphate
  modified_base 13: mod_base = OTHER; note = 2'-O-methyladenosine-3'-phosphate
  modified_base 14: mod_base = OTHER; note = 2'-O-methylguanosine-3'-phosphate
  modified_base 15: mod_base = OTHER; note = 2'-O-methyladenosine-3'-phosphate
  modified_base 16: mod_base = OTHER; note = 2'-O-methyluridine-3'-phosphate
  modified_base 17: mod_base = OTHER; note = 2'-O-methyluridine-3'-phosphate
  modified_base 18: mod_base = OTHER; note = 2'-O-methylguanosine-3'-phosphate
  modified_base 19: mod_base = OTHER; note = 2'-O-methyluridine-3'-phosphate
  modified_base 20: mod_base = OTHER; note = 2'-O-methylcytidine-3'-phosphate
  modified_base 21: mod_base = OTHER; note 2'-O-methyluridine-3'-phosphate-N-[tris(GalNAc-alkyl)-amido decanoyl)]-4-hydroxyprolinol (Hyp-(GalNAc-alkyl)3)
ttagaacaccaaagattgtct

SEQ ID NO: 3638 - RNA, 21 nt, synthetic construct
  source 1..21: mol_type = other RNA
  modified_base 1: mod_base = OTHER; note = 2'-O-methyladenosine-3'- phosphorothioate
  modified_base 2: mod_base = OTHER; note = 2'-O-methyluridine-3'-phosphorothioate
  modified_base 3: mod_base = OTHER; note = 2'-O-methylcytidine-3'-phosphate
  modified_base 4: mod_base = OTHER; note = 2'-O-methyladenosine-3'-phosphate
  modified_base 5: mod_base = OTHER; note = 2'-O-methyluridine-3'-phosphate
  modified_base 6: mod_base = OTHER; note = 2'-O-methyluridine-3'-phosphate
  modified_base 7: mod_base = OTHER; note = 2'-fluorouridine-3'-phosphate
  modified_base 8: mod_base = OTHER; note = 2'-O-methylcytidine-3'-phosphate
  modified_base 9: mod_base = OTHER; note = 2'-fluoroadenosine-3'-phosphate
  modified_base 10: mod_base = OTHER; note = 2'-fluorocytidine-3'-phosphate
  modified_base 11: mod_base = OTHER; note = 2'-fluorouridine-3'-phosphate
  modified_base 12: mod_base = OTHER; note = 2'-O-methylguanosine-3'-phosphate
  modified_base 13: mod_base = OTHER; note = 2'-O-methyluridine-3'-phosphate
  modified_base 14: mod_base = OTHER; note = 2'-O-methylcytidine-3'-phosphate
  modified_base 15: mod_base = OTHER; note = 2'-O-methyluridine-3'-phosphate
  modified_base 16: mod_base = OTHER; note = 2'-O-methyladenosine-3'-phosphate
  modified_base 17: mod_base = OTHER; note = 2'-O-methylguanosine-3'-phosphate
  modified_base 18: mod_base = OTHER; note = 2'-O-methylguanosine-3'-phosphate
  modified_base 19: mod_base = OTHER; note = 2'-O-methylcytidine-3'-phosphate
  modified_base 20: mod_base = OTHER; note = 2'-O-methyluridine-3'-phosphate
  modified_base 21: mod_base = OTHER; note 2'-O-methyladenosine-3'-phosphate-N-[tris(GalNAc-alkyl)-ami dodecanoyl)]-4-hydroxyprolinol (Hyp-(GalNAc-alkyl)3)
atcatttcactgtctaggcta

SEQ ID NO: 3639 - RNA, 21 nt, synthetic construct
  source 1..21: mol_type = other RNA
  modified_base 1: mod_base = OTHER; note = 2'-O-methyluridine-3'-phosphorothioate
  modified_base 2: mod_base = OTHER; note = 2'-O-methylcytidine-3'- phosphorothioate
  modified_base 3: mod_base = OTHER; note = 2'-O-methyladenosine-3'-phosphate
  modified_base 4: mod_base = OTHER; note = 2'-O-methylcytidine-3'-phosphate
  modified_base 5: mod_base = OTHER; note = 2'-O-methyluridine-3'-phosphate
  modified_base 6: mod_base = OTHER; note = 2'-O-methylguanosine-3'-phosphate
  modified_base 7: mod_base = OTHER; note = 2'-fluorouridine-3'-phosphate
  modified_base 8: mod_base = OTHER; note = 2'-O-methylcytidine-3'-phosphate
  modified_base 9: mod_base = OTHER; note = 2'-fluorouridine-3'-phosphate
  modified_base 10: mod_base = OTHER; note = 2'-fluoroadenosine-3'-phosphate
  modified_base 11: mod_base = OTHER; note = 2'-fluoroguanosine-3'-phosphate
  modified_base 12: mod_base = OTHER; note = 2'-O-methylguanosine-3'-phosphate
  modified_base 13: mod_base = OTHER; note = 2'-O-methylcytidine-3'-phosphate
  modified_base 14: mod_base = OTHER; note = 2'-O-methyluridine-3'-phosphate
  modified_base 15: mod_base = OTHER; note = 2'-O-methyladenosine-3'-phosphate
  modified_base 16: mod_base = OTHER; note = 2'-O-methylcytidine-3'-phosphate
  modified_base 17: mod_base = OTHER; note = 2'-O-methyladenosine-3'-phosphate
  modified_base 18: mod_base = OTHER; note = 2'-O-methyladenosine-3'-phosphate
  modified_base 19: mod_base = OTHER; note = 2'-O-methylcytidine-3'-phosphate
  modified_base 20: mod_base = OTHER; note = 2'-O-methyladenosine-3'-phosphate
  modified_base 21: mod_base = OTHER; note 2'-O-methyladenosine-3'-phosphate-N-[tris(GalNAc-alkyl)-ami dodecanoyl)]-4-hydroxyprolinol (Hyp-(GalNAc-alkyl)3)
tcactgtctaggctacaacaa

SEQ ID NO: 3640 - RNA, 21 nt, synthetic construct
  source 1..21: mol_type = other RNA
  modified_base 1: mod_base = OTHER; note = 2'-O-methylguanosine-3'- phosphorothioate
  modified_base 2: mod_base = OTHER; note = 2'-O-methylguanosine-3'- phosphorothioate
  modified_base 3: mod_base = OTHER; note = 2'-O-methyladenosine-3'-phosphate
  modified_base 4: mod_base = OTHER; note = 2'-O-methyluridine-3'-phosphate
  modified_base 5: mod_base = OTHER; note = 2'-O-methylcytidine-3'-phosphate
  modified_base 6: mod_base = OTHER; note = 2'-O-methylcytidine-3'-phosphate
  modified_base 7: mod_base = OTHER; note = 2'-fluoroadenosine-3'-phosphate
  modified_base 8: mod_base = OTHER; note = 2'-O-methylguanosine-3'-phosphate
  modified_base 9: mod_base = OTHER; note = 2'-fluorouridine-3'-phosphate
  modified_base 10: mod_base = OTHER; note = 2'-fluoroguanosine-3'-phosphate
  modified_base 11: mod_base = OTHER; note = 2'-fluorouridine-3'-phosphate
  modified_base 12: mod_base = OTHER; note = 2'-O-methyladenosine-3'-phosphate
  modified_base 13: mod_base = OTHER; note = 2'-O-methyluridine-3'-phosphate
  modified_base 14: mod_base = OTHER; note = 2'-O-methyladenosine-3'-phosphate
  modified_base 15: mod_base = OTHER; note = 2'-O-methyladenosine-3'-phosphate
  modified_base 16: mod_base = OTHER; note = 2'-O-methyladenosine-3'-phosphate
  modified_base 17: mod_base = OTHER; note = 2'-O-methyluridine-3'-phosphate
  modified_base 18: mod_base = OTHER; note = 2'-O-methylcytidine-3'-phosphate
  modified_base 19: mod_base = OTHER; note = 2'-O-methylcytidine-3'-phosphate
  modified_base 20: mod_base = OTHER; note = 2'-O-methyladenosine-3'-phosphate
  modified_base 21: mod_base = OTHER; note 2'-O-methyladenosine-3'-phosphate-N-[tris(GalNAc-alkyl)-ami dodecanoyl)]-4-hydroxyprolinol (Hyp-(GalNAc-alkyl)3)
ggatccagtgtataaatccaa

SEQ ID NO: 3641 - RNA, 21 nt, synthetic construct
  source 1..21: mol_type = other RNA
  modified_base 1: mod_base = OTHER; note = 2'-O-methylcytidine-3'- phosphorothioate
  modified_base 2: mod_base = OTHER; note = 2'-O-methyladenosine-3'- phosphorothioate
  modified_base 3: mod_base = OTHER; note = 2'-O-methyladenosine-3'-phosphate
  modified_base 4: mod_base = OTHER; note = 2'-O-methylcytidine-3'-phosphate
  modified_base 5: mod_base = OTHER; note = 2'-O-methyluridine-3'-phosphate
  modified_base 6: mod_base = OTHER; note = 2'-O-methyladenosine-3'-phosphate
  modified_base 7: mod_base = OTHER; note = 2'-fluorouridine-3'-phosphate
  modified_base 8: mod_base = OTHER; note = 2'-O-methylcytidine-3'-phosphate
  modified_base 9: mod_base = OTHER; note = 2'-fluorocytidine-3'-phosphate
  modified_base 10: mod_base = OTHER; note = 2'-fluoroadenosine-3'-phosphate
  modified_base 11: mod_base = OTHER; note = 2'-fluoroadenosine-3'-phosphate
  modified_base 12: mod_base = OTHER; note = 2'-O-methylguanosine-3'-phosphate
  modified_base 13: mod_base = OTHER; note = 2'-O-methyluridine-3'-phosphate
  modified_base 14: mod_base = OTHER; note = 2'-O-methylguanosine-3'-phosphate
  modified_base 15: mod_base = OTHER; note = 2'-O-methyluridine-3'-phosphate
  modified_base 16: mod_base = OTHER; note = 2'-O-methyluridine-3'-phosphate
  modified_base 17: mod_base = OTHER; note = 2'-O-methyladenosine-3'-phosphate
  modified_base 18: mod_base = OTHER; note = 2'-O-methyluridine-3'-phosphate
  modified_base 19: mod_base = OTHER; note = 2'-O-methyladenosine-3'-phosphate
  modified_base 20: mod_base = OTHER; note = 2'-O-methylcytidine-3'-phosphate
  modified_base 21: mod_base = OTHER; note 2'-O-methyladenosine-3'-phosphate-N-[tris(GalNAc-alkyl)-ami dodecanoyl)]-4-hydroxyprolinol (Hyp-(GalNAc-alkyl)3)
caactatccaagtgttataca

SEQ ID NO: 3642 - RNA, 21 nt, synthetic construct
  source 1..21: mol_type = other RNA
  modified_base 1: mod_base = OTHER; note = 2'-O-methyluridine-3'-phosphorothioate
  modified_base 2: mod_base = OTHER; note = 2'-O-methyluridine-3'-phosphorothioate
  modified_base 3: mod_base = OTHER; note = 2'-O-methylguanosine-3'-phosphate
  modified_base 4: mod_base = OTHER; note = 2'-O-methylguanosine-3'-phosphate
  modified_base 5: mod_base = OTHER; note = 2'-O-methyluridine-3'-phosphate
  modified_base 6: mod_base = OTHER; note = 2'-O-methyluridine-3'-phosphate
  modified_base 7: mod_base = OTHER; note = 2'-fluorocytidine-3'-phosphate
  modified_base 8: mod_base = OTHER; note = 2'-O-methylcytidine-3'-phosphate
  modified_base 9: mod_base = OTHER; note = 2'-fluoroadenosine-3'-phosphate
  modified_base 10: mod_base = OTHER; note = 2'-fluoroadenosine-3'-phosphate
  modified_base 11: mod_base = OTHER; note = 2'-fluoroguanosine-3'-phosphate
  modified_base 12: mod_base = OTHER; note = 2'-O-methyluridine-3'-phosphate
  modified_base 13: mod_base = OTHER; note = 2'-O-methylcytidine-3'-phosphate
  modified_base 14: mod_base = OTHER; note = 2'-O-methylcytidine-3'-phosphate
  modified_base 15: mod_base = OTHER; note = 2'-O-methyladenosine-3'-phosphate
  modified_base 16: mod_base = OTHER; note = 2'-O-methyladenosine-3'-phosphate
  modified_base 17: mod_base = OTHER; note = 2'-O-methyluridine-3'-phosphate
  modified_base 18: mod_base = OTHER; note = 2'-O-methyladenosine-3'-phosphate
  modified_base 19: mod_base = OTHER; note = 2'-O-methyluridine-3'-phosphate
  modified_base 20: mod_base = OTHER; note = 2'-O-methylguanosine-3'-phosphate
  modified_base 21: mod_base = OTHER; note 2'-O-methyladenosine-3'-phosphate-N-[tris(GalNAc-alkyl)-ami dodecanoyl)]-4-hydroxyprolinol (Hyp-(GalNAc-alkyl)3)
ttggttccaagtccaatatga

SEQ ID NO: 3643 - RNA, 21 nt, synthetic construct
  source 1..21: mol_type = other RNA
  modified_base 1: mod_base = OTHER; note = 2'-O-methyluridine-3'-phosphorothioate
  modified_base 2: mod_base = OTHER; note = 2'-O-methylguanosine-3'- phosphorothioate
  modified_base 3: mod_base = OTHER; note = 2'-O-methylcytidine-3'-phosphate
  modified_base 4: mod_base = OTHER; note = 2'-O-methyluridine-3'-phosphate
  modified_base 5: mod_base = OTHER; note = 2'-O-methyluridine-3'-phosphate
  modified_base 6: mod_base = OTHER; note = 2'-O-methyladenosine-3'-phosphate
  modified_base 7: mod_base = OTHER; note = 2'-fluorouridine-3'-phosphate
  modified_base 8: mod_base = OTHER; note = 2'-O-methylguanosine-3'-phosphate
  modified_base 9: mod_base = OTHER; note = 2'-fluoroadenosine-3'-phosphate
  modified_base 10: mod_base = OTHER; note = 2'-fluoroguanosine-3'-phosphate
  modified_base 11: mod_base = OTHER; note = 2'-fluoroguanosine-3'-phosphate
  modified_base 12: mod_base = OTHER; note = 2'-O-methyluridine-3'-phosphate
  modified_base 13: mod_base = OTHER; note = 2'-O-methylguanosine-3'-phosphate
  modified_base 14: mod_base = OTHER; note = 2'-O-methyladenosine-3'-phosphate
  modified_base 15: mod_base = OTHER; note = 2'-O-methyluridine-3'-phosphate
  modified_base 16: mod_base = OTHER; note = 2'-O-methylcytidine-3'-phosphate
  modified_base 17: mod_base = OTHER; note = 2'-O-methyladenosine-3'-phosphate
  modified_base 18: mod_base = OTHER; note = 2'-O-methyladenosine-3'-phosphate
  modified_base 19: mod_base = OTHER; note = 2'-O-methyladenosine-3'-phosphate
  modified_base 20: mod_base = OTHER; note = 2'-O-methylcytidine-3'-phosphate
  modified_base 21: mod_base = OTHER; note 2'-O-methyluridine-3'-phosphate-N-[tris(GalNAc-alkyl)-amido decanoyl)]-4-hydroxyprolinol (Hyp-(GalNAc-alkyl)3)
tgcttatgaggtgatcaaact

SEQ ID NO: 3644 - RNA, 21 nt, synthetic construct
  source 1..21: mol_type = other RNA
  modified_base 1: mod_base = OTHER; note = 2'-O-methyladenosine-3'- phosphorothioate
  modified_base 2: mod_base = OTHER; note = 2'-O-methyladenosine-3'- phosphorothioate
  modified_base 3: mod_base = OTHER; note = 2'-O-methyladenosine-3'-phosphate
  modified_base 4: mod_base = OTHER; note = 2'-O-methylcytidine-3'-phosphate
  modified_base 5: mod_base = OTHER; note = 2'-O-methyluridine-3'-phosphate
  modified_base 6: mod_base = OTHER; note = 2'-O-methylcytidine-3'-phosphate
  modified_base 7: mod_base = OTHER; note = 2'-fluoroadenosine-3'-phosphate
  modified_base 8: mod_base = OTHER; note = 2'-O-methyladenosine-3'-phosphate
  modified_base 9: mod_base = OTHER; note = 2'-fluoroadenosine-3'-phosphate
  modified_base 10: mod_base = OTHER; note = 2'-fluoroguanosine-3'-phosphate
  modified_base 11: mod_base = OTHER; note = 2'-fluoroguanosine-3'-phosphate
  modified_base 12: mod_base = OTHER; note = 2'-O-methylcytidine-3'-phosphate
  modified_base 13: mod_base = OTHER; note = 2'-O-methyluridine-3'-phosphate
  modified_base 14: mod_base = OTHER; note = 2'-O-methyladenosine-3'-phosphate
  modified_base 15: mod_base = OTHER; note = 2'-O-methylcytidine-3'-phosphate
  modified_base 16: mod_base = OTHER; note = 2'-O-methyladenosine-3'-phosphate
  modified_base 17: mod_base = OTHER; note = 2'-O-methylcytidine-3'-phosphate
  modified_base 18: mod_base = OTHER; note = 2'-O-methyladenosine-3'-phosphate
  modified_base 19: mod_base = OTHER; note = 2'-O-methyluridine-3'-phosphate
  modified_base 20: mod_base = OTHER; note = 2'-O-methylcytidine-3'-phosphate
  modified_base 21: mod_base = OTHER; note 2'-O-methyladenosine-3'-phosphate-N-[tris(GalNAc-alkyl)-ami dodecanoyl)]-4-hydroxyprolinol (Hyp-(GalNAc-alkyl)3)
aaactcaaaggctacacatca

SEQ ID NO: 3645 - RNA, 21 nt, synthetic construct
  source 1..21: mol_type = other RNA
  modified_base 1: mod_base = OTHER; note = 2'-O-methyluridine-3'-phosphorothioate
  modified_base 2: mod_base = OTHER; note = 2'-O-methylcytidine-3'- phosphorothioate
  modified_base 3: mod_base = OTHER; note = 2'-O-methyluridine-3'-phosphate
  modified_base 4: mod_base = OTHER; note = 2'-O-methylcytidine-3'-phosphate
  modified_base 5: mod_base = OTHER; note = 2'-O-methyladenosine-3'-phosphate
  modified_base 6: mod_base = OTHER; note = 2'-O-methylguanosine-3'-phosphate
  modified_base 7: mod_base = OTHER; note = 2'-fluoroadenosine-3'-phosphate
  modified_base 8: mod_base = OTHER; note = 2'-O-methylcytidine-3'-phosphate
  modified_base 9: mod_base = OTHER; note = 2'-fluorocytidine-3'-phosphate
  modified_base 10: mod_base = OTHER; note = 2'-fluorouridine-3'-phosphate
  modified_base 11: mod_base = OTHER; note = 2'-fluorouridine-3'-phosphate
  modified_base 12: mod_base = OTHER; note = 2'-O-methylguanosine-3'-phosphate
  modified_base 13: mod_base = OTHER; note = 2'-O-methyluridine-3'-phosphate
  modified_base 14: mod_base = OTHER; note = 2'-O-methylguanosine-3'-phosphate
  modified_base 15: mod_base = OTHER; note = 2'-O-methyladenosine-3'-phosphate
  modified_base 16: mod_base = OTHER; note = 2'-O-methyladenosine-3'-phosphate
  modified_base 17: mod_base = OTHER; note = 2'-O-methylguanosine-3'-phosphate
  modified_base 18: mod_base = OTHER; note = 2'-O-methylguanosine-3'-phosphate
  modified_base 19: mod_base = OTHER; note = 2'-O-methyluridine-3'-phosphate
  modified_base 20: mod_base = OTHER; note = 2'-O-methylguanosine-3'-phosphate
  modified_base 21: mod_base = OTHER; note 2'-O-methyladenosine-3'-phosphate-N-[tris(GalNAc-alkyl)-ami dodecanoyl)]-4-hydroxyprolinol (Hyp-(GalNAc-alkyl)3)
tctcagaccttgtgaaggtga

SEQ ID NO: 3646 - RNA, 21 nt, synthetic construct
  source 1..21: mol_type = other RNA
  modified_base 1: mod_base = OTHER; note = 2'-O-methyluridine-3'-phosphorothioate
  modified_base 2: mod_base = OTHER; note = 2'-O-methyladenosine-3'- phosphorothioate
  modified_base 3: mod_base = OTHER; note = 2'-O-methyladenosine-3'-phosphate
  modified_base 4: mod_base = OTHER; note = 2'-O-methyladenosine-3'-phosphate
  modified_base 5: mod_base = OTHER; note = 2'-O-methyladenosine-3'-phosphate
  modified_base 6: mod_base = OTHER; note = 2'-O-methyluridine-3'-phosphate
  modified_base 7: mod_base = OTHER; note = 2'-fluorocytidine-3'-phosphate
  modified_base 8: mod_base = OTHER; note = 2'-O-methylcytidine-3'-phosphate
  modified_base 9: mod_base = OTHER; note = 2'-fluoroadenosine-3'-phosphate
  modified_base 10: mod_base = OTHER; note = 2'-fluorocytidine-3'-phosphate
  modified_base 11: mod_base = OTHER; note = 2'-fluoroadenosine-3'-phosphate
  modified_base 12: mod_base = OTHER; note = 2'-O-methylguanosine-3'-phosphate
  modified_base 13: mod_base = OTHER; note = 2'-O-methylcytidine-3'-phosphate
  modified_base 14: mod_base = OTHER; note = 2'-O-methyluridine-3'-phosphate
  modified_base 15: mod_base = OTHER; note = 2'-O-methyladenosine-3'-phosphate
  modified_base 16: mod_base = OTHER; note = 2'-O-methyluridine-3'-phosphate
  modified_base 17: mod_base = OTHER; note = 2'-O-methyladenosine-3'-phosphate
  modified_base 18: mod_base = OTHER; note = 2'-O-methyluridine-3'-phosphate
  modified_base 19: mod_base = OTHER; note = 2'-O-methylcytidine-3'-phosphate
  modified_base 20: mod_base = OTHER; note = 2'-O-methylcytidine-3'-phosphate
  modified_base 21: mod_base = OTHER; note 2'-O-methyluridine-3'-phosphate-N-[tris(GalNAc-alkyl)-amido decanoyl)]-4-hydroxyprolinol (Hyp-(GalNAc-alkyl)3)
taaaatccacagctatatcct

SEQ ID NO: 3647 - RNA, 21 nt, synthetic construct
  source 1..21: mol_type = other RNA
  modified_base 1: mod_base = OTHER; note = 2'-O-methylcytidine-3'- phosphorothioate
  modified_base 2: mod_base = OTHER; note = 2'-O-methylcytidine-3'- phosphorothioate
  modified_base 3: mod_base = OTHER; note = 2'-O-methyluridine-3'-phosphate
  modified_base 4: mod_base = OTHER; note = 2'-O-methyluridine-3'-phosphate
  modified_base 5: mod_base = OTHER; note = 2'-O-methylcytidine-3'-phosphate
  modified_base 6: mod_base = OTHER; note = 2'-O-methyladenosine-3'-phosphate
  modified_base 7: mod_base = OTHER; note = 2'-fluorocytidine-3'-phosphate
  modified_base 8: mod_base = OTHER; note = 2'-O-methyluridine-3'-phosphate
  modified_base 9: mod_base = OTHER; note = 2'-fluoroguanosine-3'-phosphate
  modified_base 10: mod_base = OTHER; note = 2'-fluoroadenosine-3'-phosphate
  modified_base 11: mod_base = OTHER; note = 2'-fluoroadenosine-3'-phosphate
  modified_base 12: mod_base = OTHER; note = 2'-O-methylcytidine-3'-phosphate
  modified_base 13: mod_base = OTHER; note = 2'-O-methyladenosine-3'-phosphate
  modified_base 14: mod_base = OTHER; note = 2'-O-methyluridine-3'-phosphate
  modified_base 15: mod_base = OTHER; note = 2'-O-methylguanosine-3'-phosphate
  modified_base 16: mod_base = OTHER; note = 2'-O-methylcytidine-3'-phosphate
  modified_base 17: mod_base = OTHER; note = 2'-O-methylcytidine-3'-phosphate
  modified_base 18: mod_base = OTHER; note = 2'-O-methyluridine-3'-phosphate
  modified_base 19: mod_base = OTHER; note = 2'-O-methyladenosine-3'-phosphate
  modified_base 20: mod_base = OTHER; note = 2'-O-methylguanosine-3'-phosphate
  modified_base 21: mod_base = OTHER; note 2'-O-methyluridine-3'-phosphate-N-[tris(GalNAc-alkyl)-amido decanoyl)]-4-hydroxyprolinol (Hyp-(GalNAc-alkyl)3)
ccttcactgaacatgcctagt

SEQ ID NO: 3648 - RNA, 21 nt, synthetic construct
  source 1..21: mol_type = other RNA
  modified_base 1: mod_base = OTHER; note = 2'-O-methylguanosine-3'- phosphorothioate
  modified_base 2: mod_base = OTHER; note = 2'-O-methylguanosine-3'- phosphorothioate
  modified_base 3: mod_base = OTHER; note = 2'-O-methylguanosine-3'-phosphate
  modified_base 4: mod_base = OTHER; note = 2'-O-methyladenosine-3'-phosphate
  modified_base 5: mod_base = OTHER; note = 2'-O-methyluridine-3'-phosphate
  modified_base 6: mod_base = OTHER; note = 2'-O-methylcytidine-3'-phosphate
  modified_base 7: mod_base = OTHER; note = 2'-fluorocytidine-3'-phosphate
  modified_base 8: mod_base = OTHER; note = 2'-O-methyladenosine-3'-phosphate
  modified_base 9: mod_base = OTHER; note = 2'-fluoroguanosine-3'-phosphate
  modified_base 10: mod_base = OTHER; note = 2'-fluorouridine-3'-phosphate
  modified_base 11: mod_base = OTHER; note = 2'-fluoroguanosine-3'-phosphate
  modified_base 12: mod_base = OTHER; note = 2'-O-methyluridine-3'-phosphate
  modified_base 13: mod_base = OTHER; note = 2'-O-methyladenosine-3'-phosphate
  modified_base 14: mod_base = OTHER; note = 2'-O-methyluridine-3'-phosphate
  modified_base 15: mod_base = OTHER; note = 2'-O-methyladenosine-3'-phosphate
  modified_base 16: mod_base = OTHER; note = 2'-O-methyladenosine-3'-phosphate
  modified_base 17: mod_base = OTHER; note = 2'-O-methyladenosine-3'-phosphate
  modified_base 18: mod_base = OTHER; note = 2'-O-methyluridine-3'-phosphate
  modified_base 19: mod_base = OTHER; note = 2'-O-methylcytidine-3'-phosphate
  modified_base 20: mod_base = OTHER; note = 2'-O-methylcytidine-3'-phosphate
  modified_base 21: mod_base = OTHER; note 2'-O-methyladenosine-3'-phosphate-N-[tris(GalNAc-alkyl)-ami dodecanoyl)]-4-hydroxyprolinol (Hyp-(GalNAc-alkyl)3)
gggatccagtgtataaatcca

SEQ ID NO: 3649 - RNA, 21 nt, synthetic construct
  source 1..21: mol_type = other RNA
  modified_base 1: mod_base = OTHER; note = 2'-O-methylcytidine-3'- phosphorothioate
  modified_base 2: mod_base = OTHER; note = 2'-O-methyladenosine-3'- phosphorothioate
  modified_base 3: mod_base = OTHER; note = 2'-O-methyladenosine-3'-phosphate
  modified_base 4: mod_base = OTHER; note = 2'-O-methyluridine-3'-phosphate
  modified_base 5: mod_base = OTHER; note = 2'-O-methyladenosine-3'-phosphate
  modified_base 6: mod_base = OTHER; note = 2'-O-methyladenosine-3'-phosphate
  modified_base 7: mod_base = OTHER; note = 2'-fluoroadenosine-3'-phosphate
  modified_base 8: mod_base = OTHER; note = 2'-O-methylcytidine-3'-phosphate
  modified_base 9: mod_base = OTHER; note = 2'-fluorocytidine-3'-phosphate
  modified_base 10: mod_base = OTHER; note = 2'-fluorouridine-3'-phosphate
  modified_base 11: mod_base = OTHER; note = 2'-fluorouridine-3'-phosphate
  modified_base 12: mod_base = OTHER; note = 2'-O-methylguanosine-3'-phosphate
  modified_base 13: mod_base = OTHER; note = 2'-O-methyladenosine-3'-phosphate
  modified_base 14: mod_base = OTHER; note = 2'-O-methyladenosine-3'-phosphate
  modified_base 15: mod_base = OTHER; note = 2'-O-methylcytidine-3'-phosphate
  modified_base 16: mod_base = OTHER; note = 2'-O-methyladenosine-3'-phosphate
  modified_base 17: mod_base = OTHER; note = 2'-O-methylguanosine-3'-phosphate
  modified_base 18: mod_base = OTHER; note = 2'-O-methyluridine-3'-phosphate
  modified_base 19: mod_base = OTHER; note = 2'-O-methylguanosine-3'-phosphate
  modified_base 20: mod_base = OTHER; note = 2'-O-methyladenosine-3'-phosphate
  modified_base 21: mod_base = OTHER; note 2'-O-methyladenosine-3'-phosphate-N-[tris(GalNAc-alkyl)-ami dodecanoyl)]-4-hydroxyprolinol (Hyp-(GalNAc-alkyl)3)
caataaaccttgaacagtgaa

SEQ ID NO: 3650 - RNA, 21 nt, synthetic construct
  source 1..21: mol_type = other RNA
  modified_base 1: mod_base = OTHER; note = 2'-O-methylguanosine-3'- phosphorothioate
  modified_base 2: mod_base = OTHER; note = 2'-O-methylguanosine-3'- phosphorothioate
  modified_base 3: mod_base = OTHER; note = 2'-O-methylcytidine-3'-phosphate
  modified_base 4: mod_base = OTHER; note = 2'-O-methylcytidine-3'-phosphate
  modified_base 5: mod_base = OTHER; note = 2'-O-methyluridine-3'-phosphate
  modified_base 6: mod_base = OTHER; note = 2'-O-methylguanosine-3'-phosphate
  modified_base 7: mod_base = OTHER; note = 2'-fluorouridine-3'-phosphate
  modified_base 8: mod_base = OTHER; note = 2'-O-methylguanosine-3'-phosphate
  modified_base 9: mod_base = OTHER; note = 2'-fluorocytidine-3'-phosphate
  modified_base 10: mod_base = OTHER; note = 2'-fluorocytidine-3'-phosphate
  modified_base 11: mod_base = OTHER; note = 2'-fluoroadenosine-3'-phosphate
  modified_base 12: mod_base = OTHER; note = 2'-O-methyluridine-3'-phosphate
  modified_base 13: mod_base = OTHER; note = 2'-O-methylcytidine-3'-phosphate
  modified_base 14: mod_base = OTHER; note = 2'-O-methyladenosine-3'-phosphate
  modified_base 15: mod_base = OTHER; note = 2'-O-methylguanosine-3'-phosphate
  modified_base 16: mod_base = OTHER; note = 2'-O-methyluridine-3'-phosphate
  modified_base 17: mod_base = OTHER; note = 2'-O-methyladenosine-3'-phosphate
  modified_base 18: mod_base = OTHER; note = 2'-O-methyluridine-3'-phosphate
  modified_base 19: mod_base = OTHER; note = 2'-O-methylcytidine-3'-phosphate
  modified_base 20: mod_base = OTHER; note = 2'-O-methyluridine-3'-phosphate
  modified_base 21: mod_base = OTHER; note 2'-O-methyluridine-3'-phosphate-N-[tris(GalNAc-alkyl)-amido decanoyl)]-4-hydroxyprolinol (Hyp-(GalNAc-alkyl)3)
ggcctgtgccatcagtatctt

SEQ ID NO: 3651 - RNA, 21 nt, synthetic construct
  source 1..21: mol_type = other RNA
  modified_base 1: mod_base = OTHER; note = 2'-O-methyluridine-3'-phosphorothioate
  modified_base 2: mod_base = OTHER; note = 2'-O-methyluridine-3'-phosphorothioate
  modified_base 3: mod_base = OTHER; note = 2'-O-methylguanosine-3'-phosphate
  modified_base 4: mod_base = OTHER; note = 2'-O-methyluridine-3'-phosphate
  modified_base 5: mod_base = OTHER; note = 2'-O-methyluridine-3'-phosphate
  modified_base 6: mod_base = OTHER; note = 2'-O-methylguanosine-3'-phosphate
  modified_base 7: mod_base = OTHER; note = 2'-fluoroadenosine-3'-phosphate
  modified_base 8: mod_base = OTHER; note = 2'-O-methyluridine-3'-phosphate
  modified_base 9: mod_base = OTHER; note = 2'-fluoroguanosine-3'-phosphate
  modified_base 10: mod_base = OTHER; note = 2'-fluorouridine-3'-phosphate
  modified_base 11: mod_base = OTHER; note = 2'-fluorocytidine-3'-phosphate
  modified_base 12: mod_base = OTHER; note = 2'-O-methyladenosine-3'-phosphate
  modified_base 13: mod_base = OTHER; note = 2'-O-methyluridine-3'-phosphate
  modified_base 14: mod_base = OTHER; note = 2'-O-methylcytidine-3'-phosphate
  modified_base 15: mod_base = OTHER; note = 2'-O-methylguanosine-3'-phosphate
  modified_base 16: mod_base = OTHER; note = 2'-O-methyladenosine-3'-phosphate
  modified_base 17: mod_base = OTHER; note = 2'-O-methyladenosine-3'-phosphate
  modified_base 18: mod_base = OTHER; note = 2'-O-methylguanosine-3'-phosphate
  modified_base 19: mod_base = OTHER; note = 2'-O-methyladenosine-3'-phosphate
  modified_base 20: mod_base = OTHER; note = 2'-O-methylcytidine-3'-phosphate
  modified_base 21: mod_base = OTHER; note 2'-O-methyladenosine-3'-phosphate-N-[tris(GalNAc-alkyl)-ami dodecanoyl)]-4-hydroxyprolinol (Hyp-(GalNAc-alkyl)3)
ttgttgatgtcatcgaagaca

SEQ ID NO: 3652 - RNA, 21 nt, synthetic construct
  source 1..21: mol_type = other RNA
  modified_base 1: mod_base = OTHER; note = 2'-O-methylguanosine-3'- phosphorothioate
  modified_base 2: mod_base = OTHER; note = 2'-O-methylguanosine-3'- phosphorothioate
  modified_base 3: mod_base = OTHER; note = 2'-O-methyladenosine-3'-phosphate
  modified_base 4: mod_base = OTHER; note = 2'-O-methyluridine-3'-phosphate
  modified_base 5: mod_base = OTHER; note = 2'-O-methylcytidine-3'-phosphate
  modified_base 6: mod_base = OTHER; note = 2'-O-methyluridine-3'-phosphate
  modified_base 7: mod_base = OTHER; note = 2'-fluorouridine-3'-phosphate
  modified_base 8: mod_base = OTHER; note = 2'-O-methyladenosine-3'-phosphate
  modified_base 9: mod_base = OTHER; note = 2'-fluorouridine-3'-phosphate
  modified_base 10: mod_base = OTHER; note = 2'-fluorouridine-3'-phosphate
  modified_base 11: mod_base = OTHER; note = 2'-fluorouridine-3'-phosphate
  modified_base 12: mod_base = OTHER; note = 2'-O-methyluridine-3'-phosphate
  modified_base 13: mod_base = OTHER; note = 2'-O-methylguanosine-3'-phosphate
  modified_base 14: mod_base = OTHER; note = 2'-O-methyluridine-3'-phosphate
  modified_base 15: mod_base = OTHER; note = 2'-O-methylguanosine-3'-phosphate
  modified_base 16: mod_base = OTHER; note = 2'-O-methyladenosine-3'-phosphate
  modified_base 17: mod_base = OTHER; note = 2'-O-methyladenosine-3'-phosphate
  modified_base 18: mod_base = OTHER; note = 2'-O-methylcytidine-3'-phosphate
  modified_base 19: mod_base = OTHER; note = 2'-O-methyluridine-3'-phosphate
  modified_base 20: mod_base = OTHER; note = 2'-O-methyladenosine-3'-phosphate
  modified_base 21: mod_base = OTHER; note 2'-O-methyluridine-3'-phosphate-N-[tris(GalNAc-alkyl)-amido decanoyl)]-4-hydroxyprolinol (Hyp-(GalNAc-alkyl)3)
ggatcttattttgtgaactat

SEQ ID NO: 3653 - RNA, 21 nt, synthetic construct
  source 1..21: mol_type = other RNA
  modified_base 1: mod_base = OTHER; note = 2'-O-methyladenosine-3'- phosphorothioate
  modified_base 2: mod_base = OTHER; note = 2'-O-methyladenosine-3'- phosphorothioate
  modified_base 3: mod_base = OTHER; note = 2'-O-methylguanosine-3'-phosphate
  modified_base 4: mod_base = OTHER; note = 2'-O-methylguanosine-3'-phosphate
  modified_base 5: mod_base = OTHER; note = 2'-O-methyladenosine-3'-phosphate
  modified_base 6: mod_base = OTHER; note = 2'-O-methyluridine-3'-phosphate
  modified_base 7: mod_base = OTHER; note = 2'-fluorocytidine-3'-phosphate
  modified_base 8: mod_base = OTHER; note = 2'-O-methyluridine-3'-phosphate
  modified_base 9: mod_base = OTHER; note = 2'-fluorouridine-3'-phosphate
  modified_base 10: mod_base = OTHER; note = 2'-fluoroadenosine-3'-phosphate
  modified_base 11: mod_base = OTHER; note = 2'-fluorouridine-3'-phosphate
  modified_base 12: mod_base = OTHER; note = 2'-O-methyluridine-3'-phosphate
  modified_base 13: mod_base = OTHER; note = 2'-O-methyluridine-3'-phosphate
  modified_base 14: mod_base = OTHER; note = 2'-O-methyluridine-3'-phosphate
  modified_base 15: mod_base = OTHER; note = 2'-O-methylguanosine-3'-phosphate
  modified_base 16: mod_base = OTHER; note = 2'-O-methyluridine-3'-phosphate
  modified_base 17: mod_base = OTHER; note = 2'-O-methylguanosine-3'-phosphate
  modified_base 18: mod_base = OTHER; note = 2'-O-methyladenosine-3'-phosphate
  modified_base 19: mod_base = OTHER; note = 2'-O-methyladenosine-3'-phosphate
  modified_base 20: mod_base = OTHER; note = 2'-O-methylcytidine-3'-phosphate
  modified_base 21: mod_base = OTHER; note 2'-O-methyluridine-3'-phosphate-N-[tris(GalNAc-alkyl)-amido decanoyl)]-4-hydroxyprolinol (Hyp-(GalNAc-alkyl)3)
aaggatcttattttgtgaact

SEQ ID NO: 3654 - RNA, 21 nt, synthetic construct
  source 1..21: mol_type = other RNA
  modified_base 1: mod_base = OTHER; note = 2'-O-methyladenosine-3'- phosphorothioate
  modified_base 2: mod_base = OTHER; note = 2'-O-methyluridine-3'-phosphorothioate
  modified_base 3: mod_base = OTHER; note = 2'-O-methylcytidine-3'-phosphate
  modified_base 4: mod_base = OTHER; note = 2'-O-methyladenosine-3'-phosphate
  modified_base 5: mod_base = OTHER; note = 2'-O-methyluridine-3'-phosphate
  modified_base 6: mod_base = OTHER; note = 2'-O-methylguanosine-3'-phosphate
  modified_base 7: mod_base = OTHER; note = 2'-fluorouridine-3'-phosphate
  modified_base 8: mod_base = OTHER; note = 2'-O-methylcytidine-3'-phosphate
  modified_base 9: mod_base = OTHER; note = 2'-fluorouridine-3'-phosphate
  modified_base 10: mod_base = OTHER; note = 2'-fluorouridine-3'-phosphate
  modified_base 11: mod_base = OTHER; note = 2'-fluoroguanosine-3'-phosphate
  modified_base 12: mod_base = OTHER; note = 2'-O-methyluridine-3'-phosphate
  modified_base 13: mod_base = OTHER; note = 2'-O-methylguanosine-3'-phosphate
  modified_base 14: mod_base = OTHER; note = 2'-O-methylcytidine-3'-phosphate
  modified_base 15: mod_base = OTHER; note = 2'-O-methyladenosine-3'-phosphate
  modified_base 16: mod_base = OTHER; note = 2'-O-methyluridine-3'-phosphate
  modified_base 17: mod_base = OTHER; note = 2'-O-methyladenosine-3'-phosphate
  modified_base 18: mod_base = OTHER; note = 2'-O-methyladenosine-3'-phosphate
  modified_base 19: mod_base = OTHER; note = 2'-O-methyluridine-3'-phosphate
  modified_base 20: mod_base = OTHER; note = 2'-O-methyluridine-3'-phosphate
  modified_base 21: mod_base = OTHER; note 2'-O-methyladenosine-3'-phosphate-N-[tris(GalNAc-alkyl)-ami dodecanoyl)]-4-hydroxyprolinol (Hyp-(GalNAc-alkyl)3)
atcatgtcttgtgcataatta

SEQ ID NO: 3655 - RNA, 21 nt, synthetic construct
  source 1..21: mol_type = other RNA
  modified_base 1: mod_base = OTHER; note = 2'-O-methyluridine-3'-phosphorothioate
  modified_base 2: mod_base = OTHER; note = 2'-O-methylguanosine-3'- phosphorothioate
  modified_base 3: mod_base = OTHER; note = 2'-O-methyluridine-3'-phosphate
  modified_base 4: mod_base = OTHER; note = 2'-O-methylcytidine-3'-phosphate
  modified_base 5: mod_base = OTHER; note = 2'-O-methyladenosine-3'-phosphate
  modified_base 6: mod_base = OTHER; note = 2'-O-methyluridine-3'-phosphate
  modified_base 7: mod_base = OTHER; note = 2'-fluoroadenosine-3'-phosphate
  modified_base 8: mod_base = OTHER; note = 2'-O-methyluridine-3'-phosphate
  modified_base 9: mod_base = OTHER; note = 2'-fluorocytidine-3'-phosphate
  modified_base 10: mod_base = OTHER; note = 2'-fluoroadenosine-3'-phosphate
  modified_base 11: mod_base = OTHER; note = 2'-fluorouridine-3'-phosphate
  modified_base 12: mod_base = OTHER; note = 2'-O-methyluridine-3'-phosphate
  modified_base 13: mod_base = OTHER; note = 2'-O-methyluridine-3'-phosphate
  modified_base 14: mod_base = OTHER; note = 2'-O-methylcytidine-3'-phosphate
  modified_base 15: mod_base = OTHER; note = 2'-O-methyladenosine-3'-phosphate
  modified_base 16: mod_base = OTHER; note = 2'-O-methylcytidine-3'-phosphate
  modified_base 17: mod_base = OTHER; note = 2'-O-methyluridine-3'-phosphate
  modified_base 18: mod_base = OTHER; note = 2'-O-methylguanosine-3'-phosphate
  modified_base 19: mod_base = OTHER; note = 2'-O-methyluridine-3'-phosphate
  modified_base 20: mod_base = OTHER; note = 2'-O-methylcytidine-3'-phosphate
  modified_base 21: mod_base = OTHER; note 2'-O-methyluridine-3'-phosphate-N-[tris(GalNAc-alkyl)-amido decanoyl)]-4-hydroxyprolinol (Hyp-(GalNAc-alkyl)3)
tgtcatatcatttcactgtct

SEQ ID NO: 3656 - RNA, 21 nt, synthetic construct
  source 1..21: mol_type = other RNA
  modified_base 1: mod_base = OTHER; note = 2'-O-methyluridine-3'-phosphorothioate
  modified_base 2: mod_base = OTHER; note = 2'-O-methylcytidine-3'- phosphorothioate
  modified_base 3: mod_base = OTHER; note = 2'-O-methyladenosine-3'-phosphate
  modified_base 4: mod_base = OTHER; note = 2'-O-methyluridine-3'-phosphate
  modified_base 5: mod_base = OTHER; note = 2'-O-methyladenosine-3'-phosphate
  modified_base 6: mod_base = OTHER; note = 2'-O-methyluridine-3'-phosphate
  modified_base 7: mod_base = OTHER; note = 2'-fluorocytidine-3'-phosphate
  modified_base 8: mod_base = OTHER; note = 2'-O-methyladenosine-3'-phosphate
  modified_base 9: mod_base = OTHER; note = 2'-fluorouridine-3'-phosphate
  modified_base 10: mod_base = OTHER; note = 2'-fluorouridine-3'-phosphate
  modified_base 11: mod_base = OTHER; note = 2'-fluorouridine-3'-phosphate
  modified_base 12: mod_base = OTHER; note = 2'-O-methylcytidine-3'-phosphate
  modified_base 13: mod_base = OTHER; note = 2'-O-methyladenosine-3'-phosphate
  modified_base 14: mod_base = OTHER; note = 2'-O-methylcytidine-3'-phosphate
  modified_base 15: mod_base = OTHER; note = 2'-O-methyluridine-3'-phosphate
  modified_base 16: mod_base = OTHER; note = 2'-O-methylguanosine-3'-phosphate
  modified_base 17: mod_base = OTHER; note = 2'-O-methyluridine-3'-phosphate
  modified_base 18: mod_base = OTHER; note = 2'-O-methylcytidine-3'-phosphate
  modified_base 19: mod_base = OTHER; note = 2'-O-methyluridine-3'-phosphate
  modified_base 20: mod_base = OTHER; note = 2'-O-methyladenosine-3'-phosphate
  modified_base 21: mod_base = OTHER; note 2'-O-methyladenosine-3'-phosphate-N-[tris(GalNAc-alkyl)-ami dodecanoyl)]-4-hydroxyprolinol (Hyp-(GalNAc-alkyl)3)
tcatatcatttcactgtctaa

SEQ ID NO: 3657 - RNA, 21 nt, synthetic construct
  source 1..21: mol_type = other RNA
  modified_base 1: mod_base = OTHER; note = 2'-O-methyladenosine-3'- phosphorothioate
  modified_base 2: mod_base = OTHER; note = 2'-O-methyluridine-3'-phosphorothioate
  modified_base 3: mod_base = OTHER; note = 2'-O-methyluridine-3'-phosphate
  modified_base 4: mod_base = OTHER; note = 2'-O-methyluridine-3'-phosphate
  modified_base 5: mod_base = OTHER; note = 2'-O-methyladenosine-3'-phosphate
  modified_base 6: mod_base = OTHER; note = 2'-O-methyluridine-3'-phosphate
  modified_base 7: mod_base = OTHER; note = 2'-fluoroadenosine-3'-phosphate
  modified_base 8: mod_base = OTHER; note = 2'-O-methyladenosine-3'-phosphate
  modified_base 9: mod_base = OTHER; note = 2'-fluorouridine-3'-phosphate
  modified_base 10: mod_base = OTHER; note = 2'-fluorocytidine-3'-phosphate
  modified_base 11: mod_base = OTHER; note = 2'-fluorouridine-3'-phosphate
  modified_base 12: mod_base = OTHER; note = 2'-O-methyluridine-3'-phosphate
  modified_base 13: mod_base = OTHER; note = 2'-O-methylcytidine-3'-phosphate
  modified_base 14: mod_base = OTHER; note = 2'-O-methyluridine-3'-phosphate
  modified_base 15: mod_base = OTHER; note = 2'-O-methyladenosine-3'-phosphate
  modified_base 16: mod_base = OTHER; note = 2'-O-methyladenosine-3'-phosphate
  modified_base 17: mod_base = OTHER; note = 2'-O-methyladenosine-3'-phosphate
  modified_base 18: mod_base = OTHER; note = 2'-O-methylguanosine-3'-phosphate
  modified_base 19: mod_base = OTHER; note = 2'-O-methylguanosine-3'-phosphate
  modified_base 20: mod_base = OTHER; note = 2'-O-methyladenosine-3'-phosphate
  modified_base 21: mod_base = OTHER; note 2'-O-methyladenosine-3'-phosphate-N-[tris(GalNAc-alkyl)-ami dodecanoyl)]-4-hydroxyprolinol (Hyp-(GalNAc-alkyl)3)
atttataatcttctaaaggaa

SEQ ID NO: 3658 - RNA, 21 nt, synthetic construct
  source 1..21: mol_type = other RNA
  modified_base 1: mod_base = OTHER; note = 2'-O-methyluridine-3'-phosphorothioate
  modified_base 2: mod_base = OTHER; note = 2'-O-methylguanosine-3'- phosphorothioate
  modified_base 3: mod_base = OTHER; note = 2'-O-methylguanosine-3'-phosphate
  modified_base 4: mod_base = OTHER; note = 2'-O-methyluridine-3'-phosphate
  modified_base 5: mod_base = OTHER; note = 2'-O-methyluridine-3'-phosphate
  modified_base 6: mod_base = OTHER; note = 2'-O-methyluridine-3'-phosphate
  modified_base 7: mod_base = OTHER; note = 2'-fluoroguanosine-3'-phosphate
  modified_base 8: mod_base = OTHER; note = 2'-O-methyluridine-3'-phosphate
  modified_base 9: mod_base = OTHER; note = 2'-fluoroadenosine-3'-phosphate
  modified_base 10: mod_base = OTHER; note = 2'-fluoroadenosine-3'-phosphate
  modified_base 11: mod_base = OTHER; note = 2'-fluoroadenosine-3'-phosphate
  modified_base 12: mod_base = OTHER; note = 2'-O-methyladenosine-3'-phosphate
  modified_base 13: mod_base = OTHER; note = 2'-O-methyluridine-3'-phosphate
  modified_base 14: mod_base = OTHER; note = 2'-O-methylcytidine-3'-phosphate
  modified_base 15: mod_base = OTHER; note = 2'-O-methylcytidine-3'-phosphate
  modified_base 16: mod_base = OTHER; note = 2'-O-methyladenosine-3'-phosphate
  modified_base 17: mod_base = OTHER; note = 2'-O-methylcytidine-3'-phosphate
  modified_base 18: mod_base = OTHER; note = 2'-O-methyladenosine-3'-phosphate
  modified_base 19: mod_base = OTHER; note = 2'-O-methylguanosine-3'-phosphate
  modified_base 20: mod_base = OTHER; note = 2'-O-methylcytidine-3'-phosphate
  modified_base 21: mod_base = OTHER; note 2'-O-methyluridine-3'-phosphate-N-[tris(GalNAc-alkyl)-amido decanoyl)]-4-hydroxyprolinol (Hyp-(GalNAc-alkyl)3)
tggtttgtaaaatccacagct

SEQ ID NO: 3659 - RNA, 21 nt, synthetic construct
  source 1..21: mol_type = other RNA
  modified_base 1: mod_base = OTHER; note = 2'-O-methyladenosine-3'- phosphorothioate
  modified_base 2: mod_base = OTHER; note = 2'-O-methyluridine-3'-phosphorothioate
  modified_base 3: mod_base = OTHER; note = 2'-O-methylguanosine-3'-phosphate
  modified_base 4: mod_base = OTHER; note = 2'-O-methylcytidine-3'-phosphate
  modified_base 5: mod_base = OTHER; note = 2'-O-methyluridine-3'-phosphate
  modified_base 6: mod_base = OTHER; note = 2'-O-methylguanosine-3'-phosphate
  modified_base 7: mod_base = OTHER; note = 2'-fluoroguanosine-3'-phosphate
  modified_base 8: mod_base = OTHER; note = 2'-O-methyladenosine-3'-phosphate
  modified_base 9: mod_base = OTHER; note = 2'-fluorouridine-3'-phosphate
  modified_base 10: mod_base = OTHER; note = 2'-fluoroguanosine-3'-phosphate
  modified_base 11: mod_base = OTHER; note = 2'-fluoroguanosine-3'-phosphate
  modified_base 12: mod_base = OTHER; note = 2'-O-methyluridine-3'-phosphate
  modified_base 13: mod_base = OTHER; note = 2'-O-methyladenosine-3'-phosphate
  modified_base 14: mod_base = OTHER; note = 2'-O-methyluridine-3'-phosphate
  modified_base 15: mod_base = OTHER; note = 2'-O-methyluridine-3'-phosphate
  modified_base 16: mod_base = OTHER; note = 2'-O-methyladenosine-3'-phosphate
  modified_base 17: mod_base = OTHER; note = 2'-O-methyladenosine-3'-phosphate
  modified_base 18: mod_base = OTHER; note = 2'-O-methyluridine-3'-phosphate
  modified_base 19: mod_base = OTHER; note = 2'-O-methylcytidine-3'-phosphate
  modified_base 20: mod_base = OTHER; note = 2'-O-methyluridine-3'-phosphate
  modified_base 21: mod_base = OTHER; note 2'-O-methyluridine-3'-phosphate-N-[tris(GalNAc-alkyl)-amido decanoyl)]-4-hydroxyprolinol (Hyp-(GalNAc-alkyl)3)
atgctggatggtattaatctt

SEQ ID NO: 3660 - RNA, 21 nt, synthetic construct
  source 1..21: mol_type = other RNA
  modified_base 1: mod_base = OTHER; note = 2'-O-methyladenosine-3'- phosphorothioate
  modified_base 2: mod_base = OTHER; note = 2'-O-methyladenosine-3'- phosphorothioate
  modified_base 3: mod_base = OTHER; note = 2'-O-methylcytidine-3'-phosphate
  modified_base 4: mod_base = OTHER; note = 2'-O-methyluridine-3'-phosphate
  modified_base 5: mod_base = OTHER; note = 2'-O-methyladenosine-3'-phosphate
  modified_base 6: mod_base = OTHER; note = 2'-O-methyluridine-3'-phosphate
  modified_base 7: mod_base = OTHER; note = 2'-fluoroadenosine-3'-phosphate
  modified_base 8: mod_base = OTHER; note = 2'-O-methyluridine-3'-phosphate
  modified_base 9: mod_base = OTHER; note = 2'-fluorocytidine-3'-phosphate
  modified_base 10: mod_base = OTHER; note = 2'-fluoroadenosine-3'-phosphate
  modified_base 11: mod_base = OTHER; note = 2'-fluoroguanosine-3'-phosphate
  modified_base 12: mod_base = OTHER; note = 2'-O-methyluridine-3'-phosphate
  modified_base 13: mod_base = OTHER; note = 2'-O-methyladenosine-3'-phosphate
  modified_base 14: mod_base = OTHER; note = 2'-O-methylguanosine-3'-phosphate
  modified_base 15: mod_base = OTHER; note = 2'-O-methyluridine-3'-phosphate
  modified_base 16: mod_base = OTHER; note = 2'-O-methylguanosine-3'-phosphate
  modified_base 17: mod_base = OTHER; note = 2'-O-methyluridine-3'-phosphate
  modified_base 18: mod_base = OTHER; note = 2'-O-methyladenosine-3'-phosphate
  modified_base 19: mod_base = OTHER; note = 2'-O-methylcytidine-3'-phosphate
  modified_base 20: mod_base = OTHER; note = 2'-O-methyladenosine-3'-phosphate
  modified_base 21: mod_base = OTHER; note 2'-O-methyluridine-3'-phosphate-N-[tris(GalNAc-alkyl)-amido decanoyl)]-4-hydroxyprolinol (Hyp-(GalNAc-alkyl)3)
aactatatcagtagtgtacat

SEQ ID NO: 3661 - RNA, 21 nt, synthetic construct
  source 1..21: mol_type = other RNA
  modified_base 1: mod_base = OTHER; note = 2'-O-methyladenosine-3'- phosphorothioate
  modified_base 2: mod_base = OTHER; note = 2'-O-methyluridine-3'-phosphorothioate
  modified_base 3: mod_base = OTHER; note = 2'-O-methylcytidine-3'-phosphate
  modified_base 4: mod_base = OTHER; note = 2'-O-methyladenosine-3'-phosphate
  modified_base 5: mod_base = OTHER; note = 2'-O-methyladenosine-3'-phosphate
  modified_base 6: mod_base = OTHER; note = 2'-O-methylcytidine-3'-phosphate
  modified_base 7: mod_base = OTHER; note = 2'-fluorouridine-3'-phosphate
  modified_base 8: mod_base = OTHER; note = 2'-O-methylcytidine-3'-phosphate
  modified_base 9: mod_base = OTHER; note = 2'-fluorocytidine-3'-phosphate
  modified_base 10: mod_base = OTHER; note = 2'-fluorouridine-3'-phosphate
  modified_base 11: mod_base = OTHER; note = 2'-fluoroguanosine-3'-phosphate
  modified_base 12: mod_base = OTHER; note = 2'-O-methyladenosine-3'-phosphate
  modified_base 13: mod_base = OTHER; note = 2'-O-methyladenosine-3'-phosphate
  modified_base 14: mod_base = OTHER; note = 2'-O-methylguanosine-3'-phosphate
  modified_base 15: mod_base = OTHER; note = 2'-O-methyluridine-3'-phosphate
  modified_base 16: mod_base = OTHER; note = 2'-O-methyluridine-3'-phosphate
  modified_base 17: mod_base = OTHER; note = 2'-O-methyladenosine-3'-phosphate
  modified_base 18: mod_base = OTHER; note = 2'-O-methylguanosine-3'-phosphate
  modified_base 19: mod_base = OTHER; note = 2'-O-methyladenosine-3'-phosphate
  modified_base 20: mod_base = OTHER; note = 2'-O-methyladenosine-3'-phosphate
  modified_base 21: mod_base = OTHER; note 2'-O-methyladenosine-3'-phosphate-N-[tris(GalNAc-alkyl)-ami dodecanoyl)]-4-hydroxyprolinol (Hyp-(GalNAc-alkyl)3)
atcaactcctgaagttagaaa

SEQ ID NO: 3662 - RNA, 21 nt, synthetic construct
  source 1..21: mol_type = other RNA
  modified_base 1: mod_base = OTHER; note = 2'-O-methylcytidine-3'- phosphorothioate
  modified_base 2: mod_base = OTHER; note = 2'-O-methyluridine-3'-phosphorothioate
  modified_base 3: mod_base = OTHER; note = 2'-O-methylguanosine-3'-phosphate
  modified_base 4: mod_base = OTHER; note = 2'-O-methylguanosine-3'-phosphate
  modified_base 5: mod_base = OTHER; note = 2'-O-methyladenosine-3'-phosphate
  modified_base 6: mod_base = OTHER; note = 2'-O-methyluridine-3'-phosphate
  modified_base 7: mod_base = OTHER; note = 2'-fluoroguanosine-3'-phosphate
  modified_base 8: mod_base = OTHER; note = 2'-O-methylguanosine-3'-phosphate
  modified_base 9: mod_base = OTHER; note = 2'-fluorouridine-3'-phosphate
  modified_base 10: mod_base = OTHER; note = 2'-fluoroadenosine-3'-phosphate
  modified_base 11: mod_base = OTHER; note = 2'-fluorouridine-3'-phosphate
  modified_base 12: mod_base = OTHER; note = 2'-O-methyluridine-3'-phosphate
  modified_base 13: mod_base = OTHER; note = 2'-O-methyladenosine-3'-phosphate
  modified_base 14: mod_base = OTHER; note = 2'-O-methyladenosine-3'-phosphate
  modified_base 15: mod_base = OTHER; note = 2'-O-methyluridine-3'-phosphate
  modified_base 16: mod_base = OTHER; note = 2'-O-methylcytidine-3'-phosphate
  modified_base 17: mod_base = OTHER; note = 2'-O-methyluridine-3'-phosphate
  modified_base 18: mod_base = OTHER; note = 2'-O-methyluridine-3'-phosphate
  modified_base 19: mod_base = OTHER; note = 2'-O-methylguanosine-3'-phosphate
  modified_base 20: mod_base = OTHER; note = 2'-O-methyluridine-3'-phosphate
  modified_base 21: mod_base = OTHER; note 2'-O-methyladenosine-3'-phosphate-N-[tris(GalNAc-alkyl)-ami dodecanoyl)]-4-hydroxyprolinol (Hyp-(GalNAc-alkyl)3)
ctggatggtattaatcttgta

SEQ ID NO: 3663 - RNA, 21 nt, synthetic construct
  source 1..21: mol_type = other RNA
  modified_base 1: mod_base = OTHER; note = 2'-O-methyluridine-3'-phosphorothioate
  modified_base 2: mod_base = OTHER; note = 2'-O-methyladenosine-3'- phosphorothioate
  modified_base 3: mod_base = OTHER; note = 2'-O-methyluridine-3'-phosphate
  modified_base 4: mod_base = OTHER; note = 2'-O-methylcytidine-3'-phosphate
  modified_base 5: mod_base = OTHER; note = 2'-O-methyladenosine-3'-phosphate
  modified_base 6: mod_base = OTHER; note = 2'-O-methyluridine-3'-phosphate
  modified_base 7: mod_base = OTHER; note = 2'-fluorouridine-3'-phosphate
  modified_base 8: mod_base = OTHER; note = 2'-O-methyluridine-3'-phosphate
  modified_base 9: mod_base = OTHER; note = 2'-fluorocytidine-3'-phosphate
  modified_base 10: mod_base = OTHER; note = 2'-fluoroadenosine-3'-phosphate
  modified_base 11: mod_base = OTHER; note = 2'-fluorocytidine-3'-phosphate
  modified_base 12: mod_base = OTHER; note = 2'-O-methyluridine-3'-phosphate
  modified_base 13: mod_base = OTHER; note = 2'-O-methylguanosine-3'-phosphate
  modified_base 14: mod_base = OTHER; note = 2'-O-methyluridine-3'-phosphate
  modified_base 15: mod_base = OTHER; note = 2'-O-methylcytidine-3'-phosphate
  modified_base 16: mod_base = OTHER; note = 2'-O-methyluridine-3'-phosphate
  modified_base 17: mod_base = OTHER; note = 2'-O-methyladenosine-3'-phosphate
  modified_base 18: mod_base = OTHER; note = 2'-O-methylguanosine-3'-phosphate
  modified_base 19: mod_base = OTHER; note = 2'-O-methylguanosine-3'-phosphate
  modified_base 20: mod_base = OTHER; note = 2'-O-methylcytidine-3'-phosphate
  modified_base 21: mod_base = OTHER; note 2'-O-methyluridine-3'-phosphate-N-[tris(GalNAc-alkyl)-amido decanoyl)]-4-hydroxyprolinol (Hyp-(GalNAc-alkyl)3)
tatcatttcactgtctaggct

SEQ ID NO: 3664 - RNA, 21 nt, synthetic construct
  source 1..21: mol_type = other RNA
  modified_base 1: mod_base = OTHER; note = 2'-O-methylguanosine-3'- phosphorothioate
  modified_base 2: mod_base = OTHER; note = 2'-O-methyluridine-3'-phosphorothioate
  modified_base 3: mod_base = OTHER; note = 2'-O-methyladenosine-3'-phosphate
  modified_base 4: mod_base = OTHER; note = 2'-O-methyladenosine-3'-phosphate
  modified_base 5: mod_base = OTHER; note = 2'-O-methyladenosine-3'-phosphate
  modified_base 6: mod_base = OTHER; note = 2'-O-methyladenosine-3'-phosphate
  modified_base 7: mod_base = OTHER; note = 2'-fluorouridine-3'-phosphate
  modified_base 8: mod_base = OTHER; note = 2'-O-methylcytidine-3'-phosphate
  modified_base 9: mod_base = OTHER; note = 2'-fluorocytidine-3'-phosphate
  modified_base 10: mod_base = OTHER; note = 2'-fluoroadenosine-3'-phosphate
  modified_base 11: mod_base = OTHER; note = 2'-fluorocytidine-3'-phosphate
  modified_base 12: mod_base = OTHER; note = 2'-O-methyladenosine-3'-phosphate
  modified_base 13: mod_base = OTHER; note = 2'-O-methylguanosine-3'-phosphate
  modified_base 14: mod_base = OTHER; note = 2'-O-methylcytidine-3'-phosphate
  modified_base 15: mod_base = OTHER; note = 2'-O-methyluridine-3'-phosphate
  modified_base 16: mod_base = OTHER; note = 2'-O-methyladenosine-3'-phosphate
  modified_base 17: mod_base = OTHER; note = 2'-O-methyluridine-3'-phosphate
  modified_base 18: mod_base = OTHER; note = 2'-O-methyladenosine-3'-phosphate
  modified_base 19: mod_base = OTHER; note = 2'-O-methyluridine-3'-phosphate
  modified_base 20: mod_base = OTHER; note = 2'-O-methylcytidine-3'-phosphate
  modified_base 21: mod_base = OTHER; note 2'-O-methyladenosine-3'-phosphate-N-[tris(GalNAc-alkyl)-ami dodecanoyl)]-4-hydroxyprolinol (Hyp-(GalNAc-alkyl)3)
gtaaaatccacagctatatca

SEQ ID NO: 3665 - RNA, 21 nt, synthetic construct
  source 1..21: mol_type = other RNA
  modified_base 1: mod_base = OTHER; note = 2'-O-methyluridine-3'-phosphorothioate
  modified_base 2: mod_base = OTHER; note = 2'-O-methylcytidine-3'- phosphorothioate
  modified_base 3: mod_base = OTHER; note = 2'-O-methylcytidine-3'-phosphate
  modified_base 4: mod_base = OTHER; note = 2'-O-methyluridine-3'-phosphate
  modified_base 5: mod_base = OTHER; note = 2'-O-methyluridine-3'-phosphate
  modified_base 6: mod_base = OTHER; note = 2'-O-methyladenosine-3'-phosphate
  modified_base 7: mod_base = OTHER; note = 2'-fluoroguanosine-3'-phosphate
  modified_base 8: mod_base = OTHER; note = 2'-O-methyluridine-3'-phosphate
  modified_base 9: mod_base = OTHER; note = 2'-fluoroguanosine-3'-phosphate
  modified_base 10: mod_base = OTHER; note = 2'-fluorouridine-3'-phosphate
  modified_base 11: mod_base = OTHER; note = 2'-fluorouridine-3'-phosphate
  modified_base 12: mod_base = OTHER; note = 2'-O-methylcytidine-3'-phosphate
  modified_base 13: mod_base = OTHER; note = 2'-O-methylcytidine-3'-phosphate
  modified_base 14: mod_base = OTHER; note = 2'-O-methyluridine-3'-phosphate
  modified_base 15: mod_base = OTHER; note = 2'-O-methyluridine-3'-phosphate
  modified_base 16: mod_base = OTHER; note = 2'-O-methylguanosine-3'-phosphate
  modified_base 17: mod_base = OTHER; note = 2'-O-methylcytidine-3'-phosphate
  modified_base 18: mod_base = OTHER; note = 2'-O-methyladenosine-3'-phosphate
  modified_base 19: mod_base = OTHER; note = 2'-O-methyluridine-3'-phosphate
  modified_base 20: mod_base = OTHER; note = 2'-O-methyluridine-3'-phosphate
  modified_base 21: mod_base = OTHER; note 2'-O-methyluridine-3'-phosphate-N-[tris(GalNAc-alkyl)-amido decanoyl)]-4-hydroxyprolinol (Hyp-(GalNAc-alkyl)3)
tccttagtgttccttgcattt

SEQ ID NO: 3666 - RNA, 21 nt, synthetic construct
  source 1..21: mol_type = other RNA
  modified_base 1: mod_base = OTHER; note = 2'-O-methylcytidine-3'- phosphorothioate
  modified_base 2: mod_base = OTHER; note = 2'-O-methyladenosine-3'- phosphorothioate
  modified_base 3: mod_base = OTHER; note = 2'-O-methyluridine-3'-phosphate
  modified_base 4: mod_base = OTHER; note = 2'-O-methyladenosine-3'-phosphate
  modified_base 5: mod_base = OTHER; note = 2'-O-methyluridine-3'-phosphate
  modified_base 6: mod_base = OTHER; note = 2'-O-methylcytidine-3'-phosphate
  modified_base 7: mod_base = OTHER; note = 2'-fluoroadenosine-3'-phosphate
  modified_base 8: mod_base = OTHER; note = 2'-O-methyluridine-3'-phosphate
  modified_base 9: mod_base = OTHER; note = 2'-fluorouridine-3'-phosphate
  modified_base 10: mod_base = OTHER; note = 2'-fluorouridine-3'-phosphate
  modified_base 11: mod_base = OTHER; note = 2'-fluorocytidine-3'-phosphate
  modified_base 12: mod_base = OTHER; note = 2'-O-methyladenosine-3'-phosphate
  modified_base 13: mod_base = OTHER; note = 2'-O-methylcytidine-3'-phosphate
  modified_base 14: mod_base = OTHER; note = 2'-O-methyluridine-3'-phosphate
  modified_base 15: mod_base = OTHER; note = 2'-O-methylguanosine-3'-phosphate
  modified_base 16: mod_base = OTHER; note = 2'-O-methyluridine-3'-phosphate
  modified_base 17: mod_base = OTHER; note = 2'-O-methylcytidine-3'-phosphate
  modified_base 18: mod_base = OTHER; note = 2'-O-methyluridine-3'-phosphate
  modified_base 19: mod_base = OTHER; note = 2'-O-methyladenosine-3'-phosphate
  modified_base 20: mod_base = OTHER; note = 2'-O-methylguanosine-3'-phosphate
  modified_base 21: mod_base = OTHER; note 2'-O-methyladenosine-3'-phosphate-N-[tris(GalNAc-alkyl)-ami dodecanoyl)]-4-hydroxyprolinol (Hyp-(GalNAc-alkyl)3)
catatcatttcactgtctaga

SEQ ID NO: 3667 - RNA, 21 nt, synthetic construct
  source 1..21: mol_type = other RNA
  modified_base 1: mod_base = OTHER; note = 2'-O-methyladenosine-3'- phosphorothioate
  modified_base 2: mod_base = OTHER; note = 2'-O-methyladenosine-3'- phosphorothioate
  modified_base 3: mod_base = OTHER; note = 2'-O-methylcytidine-3'-phosphate
  modified_base 4: mod_base = OTHER; note = 2'-O-methyladenosine-3'-phosphate
  modified_base 5: mod_base = OTHER; note = 2'-O-methyluridine-3'-phosphate
  modified_base 6: mod_base = OTHER; note = 2'-O-methylcytidine-3'-phosphate
  modified_base 7: mod_base = OTHER; note = 2'-fluoroadenosine-3'-phosphate
  modified_base 8: mod_base = OTHER; note = 2'-O-methyladenosine-3'-phosphate
  modified_base 9: mod_base = OTHER; note = 2'-fluorocytidine-3'-phosphate
  modified_base 10: mod_base = OTHER; note = 2'-fluorouridine-3'-phosphate
  modified_base 11: mod_base = OTHER; note = 2'-fluorocytidine-3'-phosphate
  modified_base 12: mod_base = OTHER; note = 2'-O-methylcytidine-3'-phosphate
  modified_base 13: mod_base = OTHER; note = 2'-O-methyluridine-3'-phosphate
  modified_base 14: mod_base = OTHER; note = 2'-O-methylguanosine-3'-phosphate
  modified_base 15: mod_base = OTHER; note = 2'-O-methyladenosine-3'-phosphate
  modified_base 16: mod_base = OTHER; note = 2'-O-methyladenosine-3'-phosphate
  modified_base 17: mod_base = OTHER; note = 2'-O-methylguanosine-3'-phosphate
  modified_base 18: mod_base = OTHER; note = 2'-O-methyluridine-3'-phosphate
  modified_base 19: mod_base = OTHER; note = 2'-O-methyluridine-3'-phosphate
  modified_base 20: mod_base = OTHER; note = 2'-O-methyladenosine-3'-phosphate
  modified_base 21: mod_base = OTHER; note 2'-O-methyladenosine-3'-phosphate-N-[tris(GalNAc-alkyl)-ami dodecanoyl)]-4-hydroxyprolinol (Hyp-(GalNAc-alkyl)3)
aacatcaactcctgaagttaa

SEQ ID NO: 3668 - RNA, 21 nt, synthetic construct
  source 1..21: mol_type = other RNA
  modified_base 1: mod_base = OTHER; note = 2'-O-methylcytidine-3'- phosphorothioate
  modified_base 2: mod_base = OTHER; note = 2'-O-methylcytidine-3'- phosphorothioate
  modified_base 3: mod_base = OTHER; note = 2'-O-methyluridine-3'-phosphate
  modified_base 4: mod_base = OTHER; note = 2'-O-methylguanosine-3'-phosphate
  modified_base 5: mod_base = OTHER; note = 2'-O-methyladenosine-3'-phosphate
  modified_base 6: mod_base = OTHER; note = 2'-O-methyluridine-3'-phosphate
  modified_base 7: mod_base = OTHER; note = 2'-fluoroguanosine-3'-phosphate
  modified_base 8: mod_base = OTHER; note = 2'-O-methylcytidine-3'-phosphate
  modified_base 9: mod_base = OTHER; note = 2'-fluorouridine-3'-phosphate
  modified_base 10: mod_base = OTHER; note = 2'-fluoroguanosine-3'-phosphate
  modified_base 11: mod_base = OTHER; note = 2'-fluoroguanosine-3'-phosphate
  modified_base 12: mod_base = OTHER; note = 2'-O-methyladenosine-3'-phosphate
  modified_base 13: mod_base = OTHER; note = 2'-O-methyluridine-3'-phosphate
  modified_base 14: mod_base = OTHER; note = 2'-O-methylguanosine-3'-phosphate
  modified_base 15: mod_base = OTHER; note = 2'-O-methylguanosine-3'-phosphate
  modified_base 16: mod_base = OTHER; note = 2'-O-methyluridine-3'-phosphate
  modified_base 17: mod_base = OTHER; note = 2'-O-methyladenosine-3'-phosphate
  modified_base 18: mod_base = OTHER; note = 2'-O-methyluridine-3'-phosphate
  modified_base 19: mod_base = OTHER; note = 2'-O-methyluridine-3'-phosphate
  modified_base 20: mod_base = OTHER; note = 2'-O-methyladenosine-3'-phosphate
  modified_base 21: mod_base = OTHER; note 2'-O-methyladenosine-3'-phosphate-N-[tris(GalNAc-alkyl)-ami dodecanoyl)]-4-hydroxyprolinol (Hyp-(GalNAc-alkyl)3)
cctgatgctggatggtattaa

SEQ ID NO: 3669 - RNA, 21 nt, synthetic construct
  source 1..21: mol_type = other RNA
  modified_base 1: mod_base = OTHER; note = 2'-O-methyladenosine-3'- phosphorothioate
  modified_base 2: mod_base = OTHER; note = 2'-O-methyladenosine-3'- phosphorothioate
  modified_base 3: mod_base = OTHER; note = 2'-O-methyluridine-3'-phosphate
  modified_base 4: mod_base = OTHER; note = 2'-O-methylguanosine-3'-phosphate
  modified_base 5: mod_base = OTHER; note = 2'-O-methylcytidine-3'-phosphate
  modified_base 6: mod_base = OTHER; note = 2'-O-methyladenosine-3'-phosphate
  modified_base 7: mod_base = OTHER; note = 2'-fluoroadenosine-3'-phosphate
  modified_base 8: mod_base = OTHER; note = 2'-O-methylcytidine-3'-phosphate
  modified_base 9: mod_base = OTHER; note = 2'-fluorocytidine-3'-phosphate
  modified_base 10: mod_base = OTHER; note = 2'-fluoroadenosine-3'-phosphate
  modified_base 11: mod_base = OTHER; note = 2'-fluoroadenosine-3'-phosphate
  modified_base 12: mod_base = OTHER; note = 2'-O-methylcytidine-3'-phosphate
  modified_base 13: mod_base = OTHER; note = 2'-O-methyluridine-3'-phosphate
  modified_base 14: mod_base = OTHER; note = 2'-O-methyladenosine-3'-phosphate
  modified_base 15: mod_base = OTHER; note = 2'-O-methyluridine-3'-phosphate
  modified_base 16: mod_base = OTHER; note = 2'-O-methylcytidine-3'-phosphate
  modified_base 17: mod_base = OTHER; note = 2'-O-methylcytidine-3'-phosphate
  modified_base 18: mod_base = OTHER; note = 2'-O-methyladenosine-3'-phosphate
  modified_base 19: mod_base = OTHER; note = 2'-O-methyladenosine-3'-phosphate
  modified_base 20: mod_base = OTHER; note = 2'-O-methylguanosine-3'-phosphate
  modified_base 21: mod_base = OTHER; note 2'-O-methyluridine-3'-phosphate-N-[tris(GalNAc-alkyl)-amido decanoyl)]-4-hydroxyprolinol (Hyp-(GalNAc-alkyl)3)
aatgcaaccaactatccaagt

SEQ ID NO: 3670 - RNA, 21 nt, synthetic construct
  source 1..21: mol_type = other RNA
  modified_base 1: mod_base = OTHER; note = 2'-O-methyluridine-3'-phosphorothioate
  modified_base 2: mod_base = OTHER; note = 2'-O-methyluridine-3'-phosphorothioate
  modified_base 3: mod_base = OTHER; note = 2'-O-methyluridine-3'-phosphate
  modified_base 4: mod_base = OTHER; note = 2'-O-methyladenosine-3'-phosphate
  modified_base 5: mod_base = OTHER; note = 2'-O-methylcytidine-3'-phosphate
  modified_base 6: mod_base = OTHER; note = 2'-O-methylguanosine-3'-phosphate
  modified_base 7: mod_base = OTHER; note = 2'-fluoroguanosine-3'-phosphate
  modified_base 8: mod_base = OTHER; note = 2'-O-methyladenosine-3'-phosphate
  modified_base 9: mod_base = OTHER; note = 2'-fluoroadenosine-3'-phosphate
  modified_base 10: mod_base = OTHER; note = 2'-fluorouridine-3'-phosphate
  modified_base 11: mod_base = OTHER; note = 2'-fluoroadenosine-3'-phosphate
  modified_base 12: mod_base = OTHER; note = 2'-O-methyladenosine-3'-phosphate
  modified_base 13: mod_base = OTHER; note = 2'-O-methyladenosine-3'-phosphate
  modified_base 14: mod_base = OTHER; note = 2'-O-methylguanosine-3'-phosphate
  modified_base 15: mod_base = OTHER; note = 2'-O-methylguanosine-3'-phosphate
  modified_base 16: mod_base = OTHER; note = 2'-O-methyladenosine-3'-phosphate
  modified_base 17: mod_base = OTHER; note = 2'-O-methyluridine-3'-phosphate
  modified_base 18: mod_base = OTHER; note = 2'-O-methylguanosine-3'-phosphate
  modified_base 19: mod_base = OTHER; note = 2'-O-methyladenosine-3'-phosphate
  modified_base 20: mod_base = OTHER; note = 2'-O-methyluridine-3'-phosphate
  modified_base 21: mod_base = OTHER; note 2'-O-methyladenosine-3'-phosphate-N-[tris(GalNAc-alkyl)-ami dodecanoyl)]-4-hydroxyprolinol (Hyp-(GalNAc-alkyl)3)
tttacggaataaaggatgata

SEQ ID NO: 3671 - RNA, 21 nt, synthetic construct
  source 1..21: mol_type = other RNA
  modified_base 1: mod_base = OTHER; note = 2'-O-methyluridine-3'-phosphorothioate
  modified_base 2: mod_base = OTHER; note = 2'-O-methyluridine-3'-phosphorothioate
  modified_base 3: mod_base = OTHER; note = 2'-O-methylcytidine-3'-phosphate
  modified_base 4: mod_base = OTHER; note = 2'-O-methylcytidine-3'-phosphate
  modified_base 5: mod_base = OTHER; note = 2'-O-methyluridine-3'-phosphate
  modified_base 6: mod_base = OTHER; note = 2'-O-methyluridine-3'-phosphate
  modified_base 7: mod_base = OTHER; note = 2'-fluoroadenosine-3'-phosphate
  modified_base 8: mod_base = OTHER; note = 2'-O-methylguanosine-3'-phosphate
  modified_base 9: mod_base = OTHER; note = 2'-fluorouridine-3'-phosphate
  modified_base 10: mod_base = OTHER; note = 2'-fluoroguanosine-3'-phosphate
  modified_base 11: mod_base = OTHER; note = 2'-fluorouridine-3'-phosphate
  modified_base 12: mod_base = OTHER; note = 2'-O-methyluridine-3'-phosphate
  modified_base 13: mod_base = OTHER; note = 2'-O-methylcytidine-3'-phosphate
  modified_base 14: mod_base = OTHER; note = 2'-O-methylcytidine-3'-phosphate
  modified_base 15: mod_base = OTHER; note = 2'-O-methyluridine-3'-phosphate
  modified_base 16: mod_base = OTHER; note = 2'-O-methyluridine-3'-phosphate
  modified_base 17: mod_base = OTHER; note = 2'-O-methylguanosine-3'-phosphate
  modified_base 18: mod_base = OTHER; note = 2'-O-methylcytidine-3'-phosphate
  modified_base 19: mod_base = OTHER; note = 2'-O-methyladenosine-3'-phosphate
  modified_base 20: mod_base = OTHER; note = 2'-O-methyluridine-3'-phosphate
  modified_base 21: mod_base = OTHER; note 2'-O-methyluridine-3'-phosphate-N-[tris(GalNAc-alkyl)-amido decanoyl)]-4-hydroxyprolinol (Hyp-(GalNAc-alkyl)3)
ttccttagtgttccttgcatt

SEQ ID NO: 3672 - RNA, 21 nt, synthetic construct
  source 1..21: mol_type = other RNA
  modified_base 1: mod_base = OTHER; note = 2'-O-methylcytidine-3'- phosphorothioate
  modified_base 2: mod_base = OTHER; note = 2'-O-methyladenosine-3'- phosphorothioate
  modified_base 3: mod_base = OTHER; note = 2'-O-methyladenosine-3'-phosphate
  modified_base 4: mod_base = OTHER; note = 2'-O-methyluridine-3'-phosphate
  modified_base 5: mod_base = OTHER; note = 2'-O-methylguanosine-3'-phosphate
  modified_base 6: mod_base = OTHER; note = 2'-O-methylcytidine-3'-phosphate
  modified_base 7: mod_base = OTHER; note = 2'-fluoroadenosine-3'-phosphate
  modified_base 8: mod_base = OTHER; note = 2'-O-methyladenosine-3'-phosphate
  modified_base 9: mod_base = OTHER; note = 2'-fluorocytidine-3'-phosphate
  modified_base 10: mod_base = OTHER; note = 2'-fluorocytidine-3'-phosphate
  modified_base 11: mod_base = OTHER; note = 2'-fluoroadenosine-3'-phosphate
  modified_base 12: mod_base = OTHER; note = 2'-O-methyladenosine-3'-phosphate
  modified_base 13: mod_base = OTHER; note = 2'-O-methylcytidine-3'-phosphate
  modified_base 14: mod_base = OTHER; note = 2'-O-methyluridine-3'-phosphate
  modified_base 15: mod_base = OTHER; note = 2'-O-methyladenosine-3'-phosphate
  modified_base 16: mod_base = OTHER; note = 2'-O-methyluridine-3'-phosphate
  modified_base 17: mod_base = OTHER; note = 2'-O-methylcytidine-3'-phosphate
  modified_base 18: mod_base = OTHER; note = 2'-O-methylcytidine-3'-phosphate
  modified_base 19: mod_base = OTHER; note = 2'-O-methyladenosine-3'-phosphate
  modified_base 20: mod_base = OTHER; note = 2'-O-methyladenosine-3'-phosphate
  modified_base 21: mod_base = OTHER; note 2'-O-methyladenosine-3'-phosphate-N-[tris(GalNAc-alkyl)-ami dodecanoyl)]-4-hydroxyprolinol (Hyp-(GalNAc-alkyl)3)
caatgcaaccaactatccaaa

SEQ ID NO: 3673 - RNA, 21 nt, synthetic construct
  source 1..21: mol_type = other RNA
  modified_base 1: mod_base = OTHER; note = 2'-O-methyladenosine-3'- phosphorothioate
  modified_base 2: mod_base = OTHER; note = 2'-O-methylguanosine-3'- phosphorothioate
  modified_base 3: mod_base = OTHER; note = 2'-O-methyladenosine-3'-phosphate
  modified_base 4: mod_base = OTHER; note = 2'-O-methyluridine-3'-phosphate
  modified_base 5: mod_base = OTHER; note = 2'-O-methyluridine-3'-phosphate
  modified_base 6: mod_base = OTHER; note = 2'-O-methyluridine-3'-phosphate
  modified_base 7: mod_base = OTHER; note = 2'-fluoroguanosine-3'-phosphate
  modified_base 8: mod_base = OTHER; note = 2'-O-methylguanosine-3'-phosphate
  modified_base 9: mod_base = OTHER; note = 2'-fluorocytidine-3'-phosphate
  modified_base 10: mod_base = OTHER; note = 2'-fluoroadenosine-3'-phosphate
  modified_base 11: mod_base = OTHER; note = 2'-fluoroguanosine-3'-phosphate
  modified_base 12: mod_base = OTHER; note = 2'-O-methyladenosine-3'-phosphate
  modified_base 13: mod_base = OTHER; note = 2'-O-methylguanosine-3'-phosphate
  modified_base 14: mod_base = OTHER; note = 2'-O-methyladenosine-3'-phosphate
  modified_base 15: mod_base = OTHER; note = 2'-O-methylguanosine-3'-phosphate
  modified_base 16: mod_base = OTHER; note = 2'-O-methyluridine-3'-phosphate
  modified_base 17: mod_base = OTHER; note = 2'-O-methyladenosine-3'-phosphate
  modified_base 18: mod_base = OTHER; note = 2'-O-methyluridine-3'-phosphate
  modified_base 19: mod_base = OTHER; note = 2'-O-methyladenosine-3'-phosphate
  modified_base 20: mod_base = OTHER; note = 2'-O-methyladenosine-3'-phosphate
  modified_base 21: mod_base = OTHER; note 2'-O-methyluridine-3'-phosphate-N-[tris(GalNAc-alkyl)-amido decanoyl)]-4-hydroxyprolinol (Hyp-(GalNAc-alkyl)3)
agatttggcagagagtataat

SEQ ID NO: 3674 - RNA, 21 nt, synthetic construct
  source 1..21: mol_type = other RNA
  modified_base 1: mod_base = OTHER; note = 2'-O-methyluridine-3'-phosphorothioate
  modified_base 2: mod_base = OTHER; note = 2'-O-methyluridine-3'-phosphorothioate
  modified_base 3: mod_base = OTHER; note = 2'-O-methyluridine-3'-phosphate
  modified_base 4: mod_base = OTHER; note = 2'-O-methylcytidine-3'-phosphate
  modified_base 5: mod_base = OTHER; note = 2'-O-methylcytidine-3'-phosphate
  modified_base 6: mod_base = OTHER; note = 2'-O-methyladenosine-3'-phosphate
  modified_base 7: mod_base = OTHER; note = 2'-fluorocytidine-3'-phosphate
  modified_base 8: mod_base = OTHER; note = 2'-O-methylcytidine-3'-phosphate
  modified_base 9: mod_base = OTHER; note = 2'-fluoroadenosine-3'-phosphate
  modified_base 10: mod_base = OTHER; note = 2'-fluorouridine-3'-phosphate
  modified_base 11: mod_base = OTHER; note = 2'-fluoroguanosine-3'-phosphate
  modified_base 12: mod_base = OTHER; note = 2'-O-methyladenosine-3'-phosphate
  modified_base 13: mod_base = OTHER; note = 2'-O-methyluridine-3'-phosphate
  modified_base 14: mod_base = OTHER; note = 2'-O-methyluridine-3'-phosphate
  modified_base 15: mod_base = OTHER; note = 2'-O-methyladenosine-3'-phosphate
  modified_base 16: mod_base = OTHER; note = 2'-O-methyladenosine-3'-phosphate
  modified_base 17: mod_base = OTHER; note = 2'-O-methylguanosine-3'-phosphate
  modified_base 18: mod_base = OTHER; note = 2'-O-methylguanosine-3'-phosphate
  modified_base 19: mod_base = OTHER; note = 2'-O-methylguanosine-3'-phosphate
  modified_base 20: mod_base = OTHER; note = 2'-O-methyluridine-3'-phosphate
  modified_base 21: mod_base = OTHER; note 2'-O-methyladenosine-3'-phosphate-N-[tris(GalNAc-alkyl)-ami dodecanoyl)]-4-hydroxyprolinol (Hyp-(GalNAc-alkyl)3)
tttccaccatgattaagggta

SEQ ID NO: 3675 - RNA, 21 nt, synthetic construct
  source 1..21: mol_type = other RNA
  modified_base 1: mod_base = OTHER; note = 2'-O-methyladenosine-3'- phosphorothioate
  modified_base 2: mod_base = OTHER; note = 2'-O-methylcytidine-3'- phosphorothioate
  modified_base 3: mod_base = OTHER; note = 2'-O-methyluridine-3'-phosphate
  modified_base 4: mod_base = OTHER; note = 2'-O-methylguanosine-3'-phosphate
  modified_base 5: mod_base = OTHER; note = 2'-O-methylguanosine-3'-phosphate
  modified_base 6: mod_base = OTHER; note = 2'-O-methyluridine-3'-phosphate
  modified_base 7: mod_base = OTHER; note = 2'-fluorouridine-3'-phosphate
  modified_base 8: mod_base = OTHER; note = 2'-O-methyladenosine-3'-phosphate
  modified_base 9: mod_base = OTHER; note = 2'-fluoroguanosine-3'-phosphate
  modified_base 10: mod_base = OTHER; note = 2'-fluorouridine-3'-phosphate
  modified_base 11: mod_base = OTHER; note = 2'-fluoroguanosine-3'-phosphate
  modified_base 12: mod_base = OTHER; note = 2'-O-methyluridine-3'-phosphate
  modified_base 13: mod_base = OTHER; note = 2'-O-methylguanosine-3'-phosphate
  modified_base 14: mod_base = OTHER; note = 2'-O-methyladenosine-3'-phosphate
  modified_base 15: mod_base = OTHER; note = 2'-O-methyladenosine-3'-phosphate
  modified_base 16: mod_base = OTHER; note = 2'-O-methyladenosine-3'-phosphate
  modified_base 17: mod_base = OTHER; note = 2'-O-methyluridine-3'-phosphate
  modified_base 18: mod_base = OTHER; note = 2'-O-methyladenosine-3'-phosphate
  modified_base 19: mod_base = OTHER; note = 2'-O-methylguanosine-3'-phosphate
  modified_base 20: mod_base = OTHER; note = 2'-O-methyluridine-3'-phosphate
  modified_base 21: mod_base = OTHER; note 2'-O-methyluridine-3'-phosphate-N-[tris(GalNAc-alkyl)-amido decanoyl)]-4-hydroxyprolinol (Hyp-(GalNAc-alkyl)3)
actggttagtgtgaaatagtt

SEQ ID NO: 3676 - RNA, 21 nt, synthetic construct
  source 1..21: mol_type = other RNA
  modified_base 1: mod_base = OTHER; note = 2'-O-methylcytidine-3'- phosphorothioate
  modified_base 2: mod_base = OTHER; note = 2'-O-methyladenosine-3'- phosphorothioate
  modified_base 3: mod_base = OTHER; note = 2'-O-methyladenosine-3'-phosphate
  modified_base 4: mod_base = OTHER; note = 2'-O-methylguanosine-3'-phosphate
  modified_base 5: mod_base = OTHER; note = 2'-O-methyluridine-3'-phosphate
  modified_base 6: mod_base = OTHER; note = 2'-O-methylcytidine-3'-phosphate
  modified_base 7: mod_base = OTHER; note = 2'-fluorocytidine-3'-phosphate
  modified_base 8: mod_base = OTHER; note = 2'-O-methyladenosine-3'-phosphate
  modified_base 9: mod_base = OTHER; note = 2'-fluoroadenosine-3'-phosphate
  modified_base 10: mod_base = OTHER; note = 2'-fluorouridine-3'-phosphate
  modified_base 11: mod_base = OTHER; note = 2'-fluoroadenosine-3'-phosphate
  modified_base 12: mod_base = OTHER; note = 2'-O-methyluridine-3'-phosphate
  modified_base 13: mod_base = OTHER; note = 2'-O-methylguanosine-3'-phosphate
  modified_base 14: mod_base = OTHER; note = 2'-O-methylguanosine-3'-phosphate
  modified_base 15: mod_base = OTHER; note = 2'-O-methylcytidine-3'-phosphate
  modified_base 16: mod_base = OTHER; note = 2'-O-methyladenosine-3'-phosphate
  modified_base 17: mod_base = OTHER; note = 2'-O-methyladenosine-3'-phosphate
  modified_base 18: mod_base = OTHER; note = 2'-O-methylcytidine-3'-phosphate
  modified_base 19: mod_base = OTHER; note = 2'-O-methyluridine-3'-phosphate
  modified_base 20: mod_base = OTHER; note = 2'-O-methylcytidine-3'-phosphate
  modified_base 21: mod_base = OTHER; note 2'-O-methyluridine-3'-phosphate-N-[tris(GalNAc-alkyl)-amido decanoyl)]-4-hydroxyprolinol (Hyp-(GalNAc-alkyl)3)
caagtccaatatggcaactct

SEQ ID NO: 3677 - RNA, 21 nt, synthetic construct
  source 1..21: mol_type = other RNA
  modified_base 1: mod_base = OTHER; note = 2'-O-methyluridine-3'-phosphorothioate
  modified_base 2: mod_base = OTHER; note = 2'-O-methylcytidine-3'- phosphorothioate
  modified_base 3: mod_base = OTHER; note = 2'-O-methylcytidine-3'-phosphate
  modified_base 4: mod_base = OTHER; note = 2'-O-methyladenosine-3'-phosphate
  modified_base 5: mod_base = OTHER; note = 2'-O-methylcytidine-3'-phosphate
  modified_base 6: mod_base = OTHER; note = 2'-O-methylcytidine-3'-phosphate
  modified_base 7: mod_base = OTHER; note = 2'-fluoroadenosine-3'-phosphate
  modified_base 8: mod_base = OTHER; note = 2'-O-methyluridine-3'-phosphate
  modified_base 9: mod_base = OTHER; note = 2'-fluoroguanosine-3'-phosphate
  modified_base 10: mod_base = OTHER; note = 2'-fluoroadenosine-3'-phosphate
  modified_base 11: mod_base = OTHER; note = 2'-fluorouridine-3'-phosphate
  modified_base 12: mod_base = OTHER; note = 2'-O-methyluridine-3'-phosphate
  modified_base 13: mod_base = OTHER; note = 2'-O-methyladenosine-3'-phosphate
  modified_base 14: mod_base = OTHER; note = 2'-O-methyladenosine-3'-phosphate
  modified_base 15: mod_base = OTHER; note = 2'-O-methylguanosine-3'-phosphate
  modified_base 16: mod_base = OTHER; note = 2'-O-methylguanosine-3'-phosphate
  modified_base 17: mod_base = OTHER; note = 2'-O-methylguanosine-3'-phosphate
  modified_base 18: mod_base = OTHER; note = 2'-O-methyluridine-3'-phosphate
  modified_base 19: mod_base = OTHER; note = 2'-O-methylcytidine-3'-phosphate
  modified_base 20: mod_base = OTHER; note = 2'-O-methyluridine-3'-phosphate
  modified_base 21: mod_base = OTHER; note 2'-O-methyluridine-3'-phosphate-N-[tris(GalNAc-alkyl)-amido decanoyl)]-4-hydroxyprolinol (Hyp-(GalNAc-alkyl)3)
tccaccatgattaagggtctt

SEQ ID NO: 3678 - RNA, 21 nt, synthetic construct
  source 1..21: mol_type = other RNA
  modified_base 1: mod_base = OTHER; note = 2'-O-methyluridine-3'-phosphorothioate
  modified_base 2: mod_base = OTHER; note = 2'-O-methylcytidine-3'- phosphorothioate
  modified_base 3: mod_base = OTHER; note = 2'-O-methyladenosine-3'-phosphate
  modified_base 4: mod_base = OTHER; note = 2'-O-methyluridine-3'-phosphate
  modified_base 5: mod_base = OTHER; note = 2'-O-methyluridine-3'-phosphate
  modified_base 6: mod_base = OTHER; note = 2'-O-methyluridine-3'-phosphate
  modified_base 7: mod_base = OTHER; note = 2'-fluorocytidine-3'-phosphate
  modified_base 8: mod_base = OTHER; note = 2'-O-methyladenosine-3'-phosphate
  modified_base 9: mod_base = OTHER; note = 2'-fluorocytidine-3'-phosphate
  modified_base 10: mod_base = OTHER; note = 2'-fluorouridine-3'-phosphate
  modified_base 11: mod_base = OTHER; note = 2'-fluoroguanosine-3'-phosphate
  modified_base 12: mod_base = OTHER; note = 2'-O-methyluridine-3'-phosphate
  modified_base 13: mod_base = OTHER; note = 2'-O-methylcytidine-3'-phosphate
  modified_base 14: mod_base = OTHER; note = 2'-O-methyluridine-3'-phosphate
  modified_base 15: mod_base = OTHER; note = 2'-O-methyladenosine-3'-phosphate
  modified_base 16: mod_base = OTHER; note = 2'-O-methylguanosine-3'-phosphate
  modified_base 17: mod_base = OTHER; note = 2'-O-methylguanosine-3'-phosphate
  modified_base 18: mod_base = OTHER; note = 2'-O-methylcytidine-3'-phosphate
  modified_base 19: mod_base = OTHER; note = 2'-O-methyluridine-3'-phosphate
  modified_base 20: mod_base = OTHER; note = 2'-O-methyladenosine-3'-phosphate
  modified_base 21: mod_base = OTHER; note 2'-O-methyladenosine-3'-phosphate-N-[tris(GalNAc-alkyl)-ami dodecanoyl)]-4-hydroxyprolinol (Hyp-(GalNAc-alkyl)3)
tcatttcactgtctaggctaa

SEQ ID NO: 3679 - RNA, 21 nt, synthetic construct
  source 1..21: mol_type = other RNA
  modified_base 1: mod_base = OTHER; note = 2'-O-methyluridine-3'-phosphorothioate
  modified_base 2: mod_base = OTHER; note = 2'-O-methylguanosine-3'- phosphorothioate
  modified_base 3: mod_base = OTHER; note = 2'-O-methyluridine-3'-phosphate
  modified_base 4: mod_base = OTHER; note = 2'-O-methylcytidine-3'-phosphate
  modified_base 5: mod_base = OTHER; note = 2'-O-methylcytidine-3'-phosphate
  modified_base 6: mod_base = OTHER; note = 2'-O-methyluridine-3'-phosphate
  modified_base 7: mod_base = OTHER; note = 2'-fluorouridine-3'-phosphate
  modified_base 8: mod_base = OTHER; note = 2'-O-methyluridine-3'-phosphate
  modified_base 9: mod_base = OTHER; note = 2'-fluorouridine-3'-phosphate
  modified_base 10: mod_base = OTHER; note = 2'-fluorouridine-3'-phosphate
  modified_base 11: mod_base = OTHER; note = 2'-fluoroadenosine-3'-phosphate
  modified_base 12: mod_base = OTHER; note = 2'-O-methyluridine-3'-phosphate
  modified_base 13: mod_base = OTHER; note = 2'-O-methylcytidine-3'-phosphate
  modified_base 14: mod_base = OTHER; note = 2'-O-methyluridine-3'-phosphate
  modified_base 15: mod_base = OTHER; note = 2'-O-methylguanosine-3'-phosphate
  modified_base 16: mod_base = OTHER; note = 2'-O-methyladenosine-3'-phosphate
  modified_base 17: mod_base = OTHER; note = 2'-O-methyluridine-3'-phosphate
  modified_base 18: mod_base = OTHER; note = 2'-O-methylcytidine-3'-phosphate
  modified_base 19: mod_base = OTHER; note = 2'-O-methyluridine-3'-phosphate
  modified_base 20: mod_base = OTHER; note = 2'-O-methylguanosine-3'-phosphate
  modified_base 21: mod_base = OTHER; note 2'-O-methyluridine-3'-phosphate-N-[tris(GalNAc-alkyl)-amido decanoyl)]-4-hydroxyprolinol (Hyp-(GalNAc-alkyl)3)
tgtcctttttatctgatctgt

SEQ ID NO: 3680 - RNA, 21 nt, synthetic construct
  source 1..21: mol_type = other RNA
  modified_base 1: mod_base = OTHER; note = 2'-O-methylcytidine-3'- phosphorothioate
  modified_base 2: mod_base = OTHER; note = 2'-O-methylcytidine-3'- phosphorothioate
  modified_base 3: mod_base = OTHER; note = 2'-O-methyladenosine-3'-phosphate
  modified_base 4: mod_base = OTHER; note = 2'-O-methylguanosine-3'-phosphate
  modified_base 5: mod_base = OTHER; note = 2'-O-methyluridine-3'-phosphate
  modified_base 6: mod_base = OTHER; note = 2'-O-methylguanosine-3'-phosphate
  modified_base 7: mod_base = OTHER; note = 2'-fluorouridine-3'-phosphate
  modified_base 8: mod_base = OTHER; note = 2'-O-methyladenosine-3'-phosphate
  modified_base 9: mod_base = OTHER; note = 2'-fluorouridine-3'-phosphate
  modified_base 10: mod_base = OTHER; note = 2'-fluoroadenosine-3'-phosphate
  modified_base 11: mod_base = OTHER; note = 2'-fluoroadenosine-3'-phosphate
  modified_base 12: mod_base = OTHER; note = 2'-O-methyladenosine-3'-phosphate
  modified_base 13: mod_base = OTHER; note = 2'-O-methyluridine-3'-phosphate
  modified_base 14: mod_base = OTHER; note = 2'-O-methylcytidine-3'-phosphate
  modified_base 15: mod_base = OTHER; note = 2'-O-methylcytidine-3'-phosphate
  modified_base 16: mod_base = OTHER; note = 2'-O-methyladenosine-3'-phosphate
  modified_base 17: mod_base = OTHER; note = 2'-O-methyladenosine-3'-phosphate
  modified_base 18: mod_base = OTHER; note = 2'-O-methyluridine-3'-phosphate
  modified_base 19: mod_base = OTHER; note = 2'-O-methyladenosine-3'-phosphate
  modified_base 20: mod_base = OTHER; note = 2'-O-methyluridine-3'-phosphate
  modified_base 21: mod_base = OTHER; note 2'-O-methyladenosine-3'-phosphate-N-[tris(GalNAc-alkyl)-ami dodecanoyl)]-4-hydroxyprolinol (Hyp-(GalNAc-alkyl)3)
ccagtgtataaatccaatata

SEQ ID NO: 3681 - RNA, 21 nt, synthetic construct
  source 1..21: mol_type = other RNA
  modified_base 1: mod_base = OTHER; note = 2'-O-methyluridine-3'-phosphorothioate
  modified_base 2: mod_base = OTHER; note = 2'-O-methylcytidine-3'- phosphorothioate
  modified_base 3: mod_base = OTHER; note = 2'-O-methylcytidine-3'-phosphate
  modified_base 4: mod_base = OTHER; note = 2'-O-methyladenosine-3'-phosphate
  modified_base 5: mod_base = OTHER; note = 2'-O-methyladenosine-3'-phosphate
  modified_base 6: mod_base = OTHER; note = 2'-O-methylguanosine-3'-phosphate
  modified_base 7: mod_base = OTHER; note = 2'-fluorouridine-3'-phosphate
  modified_base 8: mod_base = OTHER; note = 2'-O-methylguanosine-3'-phosphate
  modified_base 9: mod_base = OTHER; note = 2'-fluorouridine-3'-phosphate
  modified_base 10: mod_base = OTHER; note = 2'-fluorouridine-3'-phosphate
  modified_base 11: mod_base = OTHER; note = 2'-fluoroadenosine-3'-phosphate
  modified_base 12: mod_base = OTHER; note = 2'-O-methyluridine-3'-phosphate
  modified_base 13: mod_base = OTHER; note = 2'-O-methyladenosine-3'-phosphate
  modified_base 14: mod_base = OTHER; note = 2'-O-methylcytidine-3'-phosphate
  modified_base 15: mod_base = OTHER; note = 2'-O-methylcytidine-3'-phosphate
  modified_base 16: mod_base = OTHER; note = 2'-O-methyladenosine-3'-phosphate
  modified_base 17: mod_base = OTHER; note = 2'-O-methyladenosine-3'-phosphate
  modified_base 18: mod_base = OTHER; note = 2'-O-methylcytidine-3'-phosphate
  modified_base 19: mod_base = OTHER; note = 2'-O-methyluridine-3'-phosphate
  modified_base 20: mod_base = OTHER; note = 2'-O-methyladenosine-3'-phosphate
  modified_base 21: mod_base = OTHER; note 2'-O-methyladenosine-3'-phosphate-N-[tris(GalNAc-alkyl)-ami dodecanoyl)]-4-hydroxyprolinol (Hyp-(GalNAc-alkyl)3)
tccaagtgttataccaactaa

SEQ ID NO: 3682 - RNA, 21 nt, synthetic construct
  source 1..21: mol_type = other RNA
  modified_base 1: mod_base = OTHER; note = 2'-O-methylguanosine-3'- phosphorothioate
  modified_base 2: mod_base = OTHER; note = 2'-O-methyladenosine-3'- phosphorothioate
  modified_base 3: mod_base = OTHER; note = 2'-O-methyladenosine-3'-phosphate
  modified_base 4: mod_base = OTHER; note = 2'-O-methylcytidine-3'-phosphate
  modified_base 5: mod_base = OTHER; note = 2'-O-methyladenosine-3'-phosphate
  modified_base 6: mod_base = OTHER; note = 2'-O-methylcytidine-3'-phosphate
  modified_base 7: mod_base = OTHER; note = 2'-fluorocytidine-3'-phosphate
  modified_base 8: mod_base = OTHER; note = 2'-O-methyladenosine-3'-phosphate
  modified_base 9: mod_base = OTHER; note = 2'-fluoroadenosine-3'-phosphate
  modified_base 10: mod_base = OTHER; note = 2'-fluoroadenosine-3'-phosphate
  modified_base 11: mod_base = OTHER; note = 2'-fluoroguanosine-3'-phosphate
  modified_base 12: mod_base = OTHER; note = 2'-O-methyladenosine-3'-phosphate
  modified_base 13: mod_base = OTHER; note = 2'-O-methyluridine-3'-phosphate
  modified_base 14: mod_base = OTHER; note = 2'-O-methyluridine-3'-phosphate
  modified_base 15: mod_base = OTHER; note = 2'-O-methylguanosine-3'-phosphate
  modified_base 16: mod_base = OTHER; note = 2'-O-methyluridine-3'-phosphate
  modified_base 17: mod_base = OTHER; note = 2'-O-methylcytidine-3'-phosphate
  modified_base 18: mod_base = OTHER; note = 2'-O-methyluridine-3'-phosphate
  modified_base 19: mod_base = OTHER; note = 2'-O-methylcytidine-3'-phosphate
  modified_base 20: mod_base = OTHER; note = 2'-O-methyluridine-3'-phosphate
  modified_base 21: mod_base = OTHER; note 2'-O-methyladenosine-3'-phosphate-N-[tris(GalNAc-alkyl)-ami dodecanoyl)]-4-hydroxyprolinol (Hyp-(GalNAc-alkyl)3)
gaacaccaaagattgtctcta

SEQ ID NO: 3683 - RNA, 21 nt, synthetic construct
  source 1..21: mol_type = other RNA
  modified_base 1: mod_base = OTHER; note = 2'-O-methyladenosine-3'- phosphorothioate
  modified_base 2: mod_base = OTHER; note = 2'-O-methyladenosine-3'- phosphorothioate
  modified_base 3: mod_base = OTHER; note = 2'-O-methylcytidine-3'-phosphate
  modified_base 4: mod_base = OTHER; note = 2'-O-methyladenosine-3'-phosphate
  modified_base 5: mod_base = OTHER; note = 2'-O-methylcytidine-3'-phosphate
  modified_base 6: mod_base = OTHER; note = 2'-O-methylcytidine-3'-phosphate
  modified_base 7: mod_base = OTHER; note = 2'-fluoroadenosine-3'-phosphate
  modified_base 8: mod_base = OTHER; note = 2'-O-methyladenosine-3'-phosphate
  modified_base 9: mod_base = OTHER; note = 2'-fluoroadenosine-3'-phosphate
  modified_base 10: mod_base = OTHER; note = 2'-fluoroguanosine-3'-phosphate
  modified_base 11: mod_base = OTHER; note = 2'-fluoroadenosine-3'-phosphate
  modified_base 12: mod_base = OTHER; note = 2'-O-methyluridine-3'-phosphate
  modified_base 13: mod_base = OTHER; note = 2'-O-methyluridine-3'-phosphate
  modified_base 14: mod_base = OTHER; note = 2'-O-methylguanosine-3'-phosphate
  modified_base 15: mod_base = OTHER; note = 2'-O-methyluridine-3'-phosphate
  modified_base 16: mod_base = OTHER; note = 2'-O-methylcytidine-3'-phosphate
  modified_base 17: mod_base = OTHER; note = 2'-O-methyluridine-3'-phosphate
  modified_base 18: mod_base = OTHER; note = 2'-O-methylcytidine-3'-phosphate
  modified_base 19: mod_base = OTHER; note = 2'-O-methyluridine-3'-phosphate
  modified_base 20: mod_base = OTHER; note = 2'-O-methylguanosine-3'-phosphate
  modified_base 21: mod_base = OTHER; note 2'-O-methyladenosine-3'-phosphate-N-[tris(GalNAc-alkyl)-ami dodecanoyl)]-4-hydroxyprolinol (Hyp-(GalNAc-alkyl)3)
aacaccaaagattgtctctga

SEQ ID NO: 3684 - RNA, 21 nt, synthetic construct
  source 1..21: mol_type = other RNA
  modified_base 1: mod_base = OTHER; note = 2'-O-methyladenosine-3'- phosphorothioate
  modified_base 2: mod_base = OTHER; note = 2'-O-methyluridine-3'-phosphorothioate
  modified_base 3: mod_base = OTHER; note = 2'-O-methylguanosine-3'-phosphate
  modified_base 4: mod_base = OTHER; note = 2'-O-methyluridine-3'-phosphate
  modified_base 5: mod_base = OTHER; note = 2'-O-methyluridine-3'-phosphate
  modified_base 6: mod_base = OTHER; note = 2'-O-methylguanosine-3'-phosphate
  modified_base 7: mod_base = OTHER; note = 2'-fluorouridine-3'-phosphate
  modified_base 8: mod_base = OTHER; note = 2'-O-methylcytidine-3'-phosphate
  modified_base 9: mod_base = OTHER; note = 2'-fluorocytidine-3'-phosphate
  modified_base 10: mod_base = OTHER; note = 2'-fluorouridine-3'-phosphate
  modified_base 11: mod_base = OTHER; note = 2'-fluorouridine-3'-phosphate
  modified_base 12: mod_base = OTHER; note = 2'-O-methyluridine-3'-phosphate
  modified_base 13: mod_base = OTHER; note = 2'-O-methyluridine-3'-phosphate
  modified_base 14: mod_base = OTHER; note = 2'-O-methyluridine-3'-phosphate
  modified_base 15: mod_base = OTHER; note = 2'-O-methyladenosine-3'-phosphate
  modified_base 16: mod_base = OTHER; note = 2'-O-methyluridine-3'-phosphate
  modified_base 17: mod_base = OTHER; note = 2'-O-methylcytidine-3'-phosphate
  modified_base 18: mod_base = OTHER; note = 2'-O-methyluridine-3'-phosphate
  modified_base 19: mod_base = OTHER; note = 2'-O-methylguanosine-3'-phosphate
  modified_base 20: mod_base = OTHER; note = 2'-O-methyladenosine-3'-phosphate
  modified_base 21: mod_base = OTHER; note 2'-O-methyluridine-3'-phosphate-N-[tris(GalNAc-alkyl)-amido decanoyl)]-4-hydroxyprolinol (Hyp-(GalNAc-alkyl)3)
atgttgtcctttttatctgat

SEQ ID NO: 3685 - RNA, 21 nt, synthetic construct
  source 1..21: mol_type = other RNA
  modified_base 1: mod_base = OTHER; note = 2'-O-methyluridine-3'-phosphorothioate
  modified_base 2: mod_base = OTHER; note = 2'-O-methylcytidine-3'- phosphorothioate
  modified_base 3: mod_base = OTHER; note = 2'-O-methyladenosine-3'-phosphate
  modified_base 4: mod_base = OTHER; note = 2'-O-methyladenosine-3'-phosphate
  modified_base 5: mod_base = OTHER; note = 2'-O-methylcytidine-3'-phosphate
  modified_base 6: mod_base = OTHER; note = 2'-O-methyluridine-3'-phosphate
  modified_base 7: mod_base = OTHER; note = 2'-fluorocytidine-3'-phosphate
  modified_base 8: mod_base = OTHER; note = 2'-O-methylcytidine-3'-phosphate
  modified_base 9: mod_base = OTHER; note = 2'-fluorouridine-3'-phosphate
  modified_base 10: mod_base = OTHER; note = 2'-fluoroguanosine-3'-phosphate
  modified_base 11: mod_base = OTHER; note = 2'-fluoroadenosine-3'-phosphate
  modified_base 12: mod_base = OTHER; note = 2'-O-methyladenosine-3'-phosphate
  modified_base 13: mod_base = OTHER; note = 2'-O-methylguanosine-3'-phosphate
  modified_base 14: mod_base = OTHER; note = 2'-O-methyluridine-3'-phosphate
  modified_base 15: mod_base = OTHER; note = 2'-O-methyluridine-3'-phosphate
  modified_base 16: mod_base = OTHER; note = 2'-O-methyladenosine-3'-phosphate
  modified_base 17: mod_base = OTHER; note = 2'-O-methylguanosine-3'-phosphate
  modified_base 18: mod_base = OTHER; note = 2'-O-methyladenosine-3'-phosphate
  modified_base 19: mod_base = OTHER; note = 2'-O-methyladenosine-3'-phosphate
  modified_base 20: mod_base = OTHER; note = 2'-O-methyladenosine-3'-phosphate
  modified_base 21: mod_base = OTHER; note 2'-O-methyluridine-3'-phosphate-N-[tris(GalNAc-alkyl)-amido decanoyl)]-4-hydroxyprolinol (Hyp-(GalNAc-alkyl)3)
tcaactcctgaagttagaaat

SEQ ID NO: 3686 - RNA, 21 nt, synthetic construct
  source 1..21: mol_type = other RNA
  modified_base 1: mod_base = OTHER; note = 2'-O-methyladenosine-3'- phosphorothioate
  modified_base 2: mod_base = OTHER; note = 2'-O-methyladenosine-3'- phosphorothioate
  modified_base 3: mod_base = OTHER; note = 2'-O-methylcytidine-3'-phosphate
  modified_base 4: mod_base = OTHER; note = 2'-O-methyluridine-3'-phosphate
  modified_base 5: mod_base = OTHER; note = 2'-O-methyladenosine-3'-phosphate
  modified_base 6: mod_base = OTHER; note = 2'-O-methyluridine-3'-phosphate
  modified_base 7: mod_base = OTHER; note = 2'-fluorocytidine-3'-phosphate
  modified_base 8: mod_base = OTHER; note = 2'-O-methylcytidine-3'-phosphate
  modified_base 9: mod_base = OTHER; note = 2'-fluoroadenosine-3'-phosphate
  modified_base 10: mod_base = OTHER; note = 2'-fluoroadenosine-3'-phosphate
  modified_base 11: mod_base = OTHER; note = 2'-fluoroguanosine-3'-phosphate
  modified_base 12: mod_base = OTHER; note = 2'-O-methyluridine-3'-phosphate
  modified_base 13: mod_base = OTHER; note = 2'-O-methylguanosine-3'-phosphate
  modified_base 14: mod_base = OTHER; note = 2'-O-methyluridine-3'-phosphate
  modified_base 15: mod_base = OTHER; note = 2'-O-methyluridine-3'-phosphate
  modified_base 16: mod_base = OTHER; note = 2'-O-methyladenosine-3'-phosphate
  modified_base 17: mod_base = OTHER; note = 2'-O-methyluridine-3'-phosphate
  modified_base 18: mod_base = OTHER; note = 2'-O-methyladenosine-3'-phosphate
  modified_base 19: mod_base = OTHER; note = 2'-O-methylcytidine-3'-phosphate
  modified_base 20: mod_base = OTHER; note = 2'-O-methylcytidine-3'-phosphate
  modified_base 21: mod_base = OTHER; note 2'-O-methyladenosine-3'-phosphate-N-[tris(GalNAc-alkyl)-ami dodecanoyl)]-4-hydroxyprolinol (Hyp-(GalNAc-alkyl)3)
aactatccaagtgttatacca

SEQ ID NO: 3687 - RNA, 21 nt, synthetic construct
  source 1..21: mol_type = other RNA
  modified_base 1: mod_base = OTHER; note = 2'-O-methylguanosine-3'- phosphorothioate
  modified_base 2: mod_base = OTHER; note = 2'-O-methylguanosine-3'- phosphorothioate
  modified_base 3: mod_base = OTHER; note = 2'-O-methyluridine-3'-phosphate
  modified_base 4: mod_base = OTHER; note = 2'-O-methyladenosine-3'-phosphate
  modified_base 5: mod_base = OTHER; note = 2'-O-methyluridine-3'-phosphate
  modified_base 6: mod_base = OTHER; note = 2'-O-methyluridine-3'-phosphate
  modified_base 7: mod_base = OTHER; note = 2'-fluoroadenosine-3'-phosphate
  modified_base 8: mod_base = OTHER; note = 2'-O-methyladenosine-3'-phosphate
  modified_base 9: mod_base = OTHER; note = 2'-fluorouridine-3'-phosphate
  modified_base 10: mod_base = OTHER; note = 2'-fluorocytidine-3'-phosphate
  modified_base 11: mod_base = OTHER; note = 2'-fluorouridine-3'-phosphate
  modified_base 12: mod_base = OTHER; note = 2'-O-methyluridine-3'-phosphate
  modified_base 13: mod_base = OTHER; note = 2'-O-methylguanosine-3'-phosphate
  modified_base 14: mod_base = OTHER; note = 2'-O-methyluridine-3'-phosphate
  modified_base 15: mod_base = OTHER; note = 2'-O-methylguanosine-3'-phosphate
  modified_base 16: mod_base = OTHER; note = 2'-O-methyluridine-3'-phosphate
  modified_base 17: mod_base = OTHER; note = 2'-O-methyladenosine-3'-phosphate
  modified_base 18: mod_base = OTHER; note = 2'-O-methylguanosine-3'-phosphate
  modified_base 19: mod_base = OTHER; note = 2'-O-methyluridine-3'-phosphate
  modified_base 20: mod_base = OTHER; note = 2'-O-methylcytidine-3'-phosphate
  modified_base 21: mod_base = OTHER; note 2'-O-methyluridine-3'-phosphate-N-[tris(GalNAc-alkyl)-amido decanoyl)]-4-hydroxyprolinol (Hyp-(GalNAc-alkyl)3)
ggtattaatcttgtgtagtct

SEQ ID NO: 3688 - RNA, 21 nt, synthetic construct
  source 1..21: mol_type = other RNA
  modified_base 1: mod_base = OTHER; note = 2'-O-methylguanosine-3'- phosphorothioate
  modified_base 2: mod_base = OTHER; note = 2'-O-methylguanosine-3'- phosphorothioate
  modified_base 3: mod_base = OTHER; note = 2'-O-methylcytidine-3'-phosphate
  modified_base 4: mod_base = OTHER; note = 2'-O-methyluridine-3'-phosphate
  modified_base 5: mod_base = OTHER; note = 2'-O-methylcytidine-3'-phosphate
  modified_base 6: mod_base = OTHER; note = 2'-O-methylcytidine-3'-phosphate
  modified_base 7: mod_base = OTHER; note = 2'-fluorouridine-3'-phosphate
  modified_base 8: mod_base = OTHER; note = 2'-O-methyluridine-3'-phosphate
  modified_base 9: mod_base = OTHER; note = 2'-fluorocytidine-3'-phosphate
  modified_base 10: mod_base = OTHER; note = 2'-fluoroadenosine-3'-phosphate
  modified_base 11: mod_base = OTHER; note = 2'-fluorocytidine-3'-phosphate
  modified_base 12: mod_base = OTHER; note = 2'-O-methyluridine-3'-phosphate
  modified_base 13: mod_base = OTHER; note = 2'-O-methylguanosine-3'-phosphate
  modified_base 14: mod_base = OTHER; note = 2'-O-methyladenosine-3'-phosphate
  modified_base 15: mod_base = OTHER; note = 2'-O-methyladenosine-3'-phosphate
  modified_base 16: mod_base = OTHER; note = 2'-O-methylcytidine-3'-phosphate
  modified_base 17: mod_base = OTHER; note = 2'-O-methyladenosine-3'-phosphate
  modified_base 18: mod_base = OTHER; note = 2'-O-methyluridine-3'-phosphate
  modified_base 19: mod_base = OTHER; note = 2'-O-methylguanosine-3'-phosphate
  modified_base 20: mod_base = OTHER; note = 2'-O-methylcytidine-3'-phosphate
  modified_base 21: mod_base = OTHER; note 2'-O-methyladenosine-3'-phosphate-N-[tris(GalNAc-alkyl)-ami dodecanoyl)]-4-hydroxyprolinol (Hyp-(GalNAc-alkyl)3)
ggctccttcactgaacatgca

SEQ ID NO: 3689 - RNA, 21 nt, synthetic construct
  source 1..21: mol_type = other RNA
  modified_base 1: mod_base = OTHER; note = 2'-O-methyluridine-3'-phosphorothioate
  modified_base 2: mod_base = OTHER; note = 2'-O-methyladenosine-3'- phosphorothioate
  modified_base 3: mod_base = OTHER; note = 2'-O-methyluridine-3'-phosphate
  modified_base 4: mod_base = OTHER; note = 2'-O-methylcytidine-3'-phosphate
  modified_base 5: mod_base = OTHER; note = 2'-O-methyladenosine-3'-phosphate
  modified_base 6: mod_base = OTHER; note = 2'-O-methylguanosine-3'-phosphate
  modified_base 7: mod_base = OTHER; note = 2'-fluorouridine-3'-phosphate
  modified_base 8: mod_base = OTHER; note = 2'-O-methyladenosine-3'-phosphate
  modified_base 9: mod_base = OTHER; note = 2'-fluoroguanosine-3'-phosphate
  modified_base 10: mod_base = OTHER; note = 2'-fluorouridine-3'-phosphate
  modified_base 11: mod_base = OTHER; note = 2'-fluoroguanosine-3'-phosphate
  modified_base 12: mod_base = OTHER; note = 2'-O-methyluridine-3'-phosphate
  modified_base 13: mod_base = OTHER; note = 2'-O-methyladenosine-3'-phosphate
  modified_base 14: mod_base = OTHER; note = 2'-O-methylcytidine-3'-phosphate
  modified_base 15: mod_base = OTHER; note = 2'-O-methyladenosine-3'-phosphate
  modified_base 16: mod_base = OTHER; note = 2'-O-methyluridine-3'-phosphate
  modified_base 17: mod_base = OTHER; note = 2'-O-methyluridine-3'-phosphate
  modified_base 18: mod_base = OTHER; note = 2'-O-methyladenosine-3'-phosphate
  modified_base 19: mod_base = OTHER; note = 2'-O-methylcytidine-3'-phosphate
  modified_base 20: mod_base = OTHER; note = 2'-O-methylcytidine-3'-phosphate
  modified_base 21: mod_base = OTHER; note 2'-O-methyladenosine-3'-phosphate-N-[tris(GalNAc-alkyl)-ami dodecanoyl)]-4-hydroxyprolinol (Hyp-(GalNAc-alkyl)3)
tatcagtagtgtacattacca

SEQ ID NO: 3690 - RNA, 21 nt, synthetic construct
  source 1..21: mol_type = other RNA
  modified_base 1: mod_base = OTHER; note = 2'-O-methylcytidine-3'- phosphorothioate
  modified_base 2: mod_base = OTHER; note = 2'-O-methyladenosine-3'- phosphorothioate
  modified_base 3: mod_base = OTHER; note = 2'-O-methylguanosine-3'-phosphate
  modified_base 4: mod_base = OTHER; note = 2'-O-methylcytidine-3'-phosphate
  modified_base 5: mod_base = OTHER; note = 2'-O-methylcytidine-3'-phosphate
  modified_base 6: mod_base = OTHER; note = 2'-O-methyluridine-3'-phosphate
  modified_base 7: mod_base = OTHER; note = 2'-fluorouridine-3'-phosphate
  modified_base 8: mod_base = OTHER; note = 2'-O-methyluridine-3'-phosphate
  modified_base 9: mod_base = OTHER; note = 2'-fluorouridine-3'-phosphate
  modified_base 10: mod_base = OTHER; note = 2'-fluorocytidine-3'-phosphate
  modified_base 11: mod_base = OTHER; note = 2'-fluorocytidine-3'-phosphate
  modified_base 12: mod_base = OTHER; note = 2'-O-methyluridine-3'-phosphate
  modified_base 13: mod_base = OTHER; note = 2'-O-methyluridine-3'-phosphate
  modified_base 14: mod_base = OTHER; note = 2'-O-methyladenosine-3'-phosphate
  modified_base 15: mod_base = OTHER; note = 2'-O-methylguanosine-3'-phosphate
  modified_base 16: mod_base = OTHER; note = 2'-O-methyladenosine-3'-phosphate
  modified_base 17: mod_base = OTHER; note = 2'-O-methyladenosine-3'-phosphate
  modified_base 18: mod_base = OTHER; note = 2'-O-methylcytidine-3'-phosphate
  modified_base 19: mod_base = OTHER; note = 2'-O-methyladenosine-3'-phosphate
  modified_base 20: mod_base = OTHER; note = 2'-O-methylcytidine-3'-phosphate
  modified_base 21: mod_base = OTHER; note 2'-O-methyladenosine-3'-phosphate-N-[tris(GalNAc-alkyl)-ami dodecanoyl)]-4-hydroxyprolinol (Hyp-(GalNAc-alkyl)3)
cagccttttccttagaacaca

SEQ ID NO: 3691 - RNA, 21 nt, synthetic construct
  source 1..21: mol_type = other RNA
  modified_base 1: mod_base = OTHER; note = 2'-O-methylcytidine-3'- phosphorothioate
  modified_base 2: mod_base = OTHER; note = 2'-O-methyluridine-3'-phosphorothioate
  modified_base 3: mod_base = OTHER; note = 2'-O-methylguanosine-3'-phosphate
  modified_base 4: mod_base = OTHER; note = 2'-O-methylguanosine-3'-phosphate
  modified_base 5: mod_base = OTHER; note = 2'-O-methyluridine-3'-phosphate
  modified_base 6: mod_base = OTHER; note = 2'-O-methyluridine-3'-phosphate
  modified_base 7: mod_base = OTHER; note = 2'-fluoroadenosine-3'-phosphate
  modified_base 8: mod_base = OTHER; note = 2'-O-methylguanosine-3'-phosphate
  modified_base 9: mod_base = OTHER; note = 2'-fluorouridine-3'-phosphate
  modified_base 10: mod_base = OTHER; note = 2'-fluoroguanosine-3'-phosphate
  modified_base 11: mod_base = OTHER; note = 2'-fluorouridine-3'-phosphate
  modified_base 12: mod_base = OTHER; note = 2'-O-methylguanosine-3'-phosphate
  modified_base 13: mod_base = OTHER; note = 2'-O-methyladenosine-3'-phosphate
  modified_base 14: mod_base = OTHER; note = 2'-O-methyladenosine-3'-phosphate
  modified_base 15: mod_base = OTHER; note = 2'-O-methyladenosine-3'-phosphate
  modified_base 16: mod_base = OTHER; note = 2'-O-methyluridine-3'-phosphate
  modified_base 17: mod_base = OTHER; note = 2'-O-methyladenosine-3'-phosphate
  modified_base 18: mod_base = OTHER; note = 2'-O-methylguanosine-3'-phosphate
  modified_base 19: mod_base = OTHER; note = 2'-O-methyluridine-3'-phosphate
  modified_base 20: mod_base = OTHER; note = 2'-O-methyluridine-3'-phosphate
  modified_base 21: mod_base = OTHER; note 2'-O-methyladenosine-3'-phosphate-N-[tris(GalNAc-alkyl)-ami dodecanoyl)]-4-hydroxyprolinol (Hyp-(GalNAc-alkyl)3)
ctggttagtgtgaaatagtta

SEQ ID NO: 3692 - RNA, 21 nt, synthetic construct
  source 1..21: mol_type = other RNA
  modified_base 1: mod_base = OTHER; note = 2'-O-methyladenosine-3'- phosphorothioate
  modified_base 2: mod_base = OTHER; note = 2'-O-methylcytidine-3'- phosphorothioate
  modified_base 3: mod_base = OTHER; note = 2'-O-methyluridine-3'-phosphate
  modified_base 4: mod_base = OTHER; note = 2'-O-methyladenosine-3'-phosphate
  modified_base 5: mod_base = OTHER; note = 2'-O-methyluridine-3'-phosphate
  modified_base 6: mod_base = OTHER; note = 2'-O-methyladenosine-3'-phosphate
  modified_base 7: mod_base = OTHER; note = 2'-fluorouridine-3'-phosphate
  modified_base 8: mod_base = OTHER; note = 2'-O-methylcytidine-3'-phosphate
  modified_base 9: mod_base = OTHER; note = 2'-fluoroadenosine-3'-phosphate
  modified_base 10: mod_base = OTHER; note = 2'-fluoroguanosine-3'-phosphate
  modified_base 11: mod_base = OTHER; note = 2'-fluorouridine-3'-phosphate
  modified_base 12: mod_base = OTHER; note = 2'-O-methyladenosine-3'-phosphate
  modified_base 13: mod_base = OTHER; note = 2'-O-methylguanosine-3'-phosphate
  modified_base 14: mod_base = OTHER; note = 2'-O-methyluridine-3'-phosphate
  modified_base 15: mod_base = OTHER; note = 2'-O-methylguanosine-3'-phosphate
  modified_base 16: mod_base = OTHER; note = 2'-O-methyluridine-3'-phosphate
  modified_base 17: mod_base = OTHER; note = 2'-O-methyladenosine-3'-phosphate
  modified_base 18: mod_base = OTHER; note = 2'-O-methylcytidine-3'-phosphate
  modified_base 19: mod_base = OTHER; note = 2'-O-methyladenosine-3'-phosphate
  modified_base 20: mod_base = OTHER; note = 2'-O-methyluridine-3'-phosphate
  modified_base 21: mod_base = OTHER; note 2'-O-methyluridine-3'-phosphate-N-[tris(GalNAc-alkyl)-amido decanoyl)]-4-hydroxyprolinol (Hyp-(GalNAc-alkyl)3)
actatatcagtagtgtacatt

SEQ ID NO: 3693 - RNA, 21 nt, synthetic construct
  source 1..21: mol_type = other RNA
  modified_base 1: mod_base = OTHER; note = 2'-O-methyluridine-3'-phosphorothioate
  modified_base 2: mod_base = OTHER; note = 2'-O-methyladenosine-3'- phosphorothioate
  modified_base 3: mod_base = OTHER; note = 2'-O-methyluridine-3'-phosphate
  modified_base 4: mod_base = OTHER; note = 2'-O-methyladenosine-3'-phosphate
  modified_base 5: mod_base = OTHER; note = 2'-O-methyluridine-3'-phosphate
  modified_base 6: mod_base = OTHER; note = 2'-O-methylcytidine-3'-phosphate
  modified_base 7: mod_base = OTHER; note = 2'-fluoroadenosine-3'-phosphate
  modified_base 8: mod_base = OTHER; note = 2'-O-methylguanosine-3'-phosphate
  modified_base 9: mod_base = OTHER; note = 2'-fluorouridine-3'-phosphate
  modified_base 10: mod_base = OTHER; note = 2'-fluoroadenosine-3'-phosphate
  modified_base 11: mod_base = OTHER; note = 2'-fluoroguanosine-3'-phosphate
  modified_base 12: mod_base = OTHER; note = 2'-O-methyluridine-3'-phosphate
  modified_base 13: mod_base = OTHER; note = 2'-O-methylguanosine-3'-phosphate
  modified_base 14: mod_base = OTHER; note = 2'-O-methyluridine-3'-phosphate
  modified_base 15: mod_base = OTHER; note = 2'-O-methyladenosine-3'-phosphate
  modified_base 16: mod_base = OTHER; note = 2'-O-methylcytidine-3'-phosphate
  modified_base 17: mod_base = OTHER; note = 2'-O-methyladenosine-3'-phosphate
  modified_base 18: mod_base = OTHER; note = 2'-O-methyluridine-3'-phosphate
  modified_base 19: mod_base = OTHER; note = 2'-O-methyluridine-3'-phosphate
  modified_base 20: mod_base = OTHER; note = 2'-O-methyladenosine-3'-phosphate
  modified_base 21: mod_base = OTHER; note 2'-O-methyladenosine-3'-phosphate-N-[tris(GalNAc-alkyl)-ami dodecanoyl)]-4-hydroxyprolinol (Hyp-(GalNAc-alkyl)3)
tatatcagtagtgtacattaa

SEQ ID NO: 3694 - RNA, 21 nt, synthetic construct
  source 1..21: mol_type = other RNA
  modified_base 1: mod_base = OTHER; note = 2'-O-methylguanosine-3'- phosphorothioate
  modified_base 2: mod_base = OTHER; note = 2'-O-methyluridine-3'-phosphorothioate
  modified_base 3: mod_base = OTHER; note = 2'-O-methyladenosine-3'-phosphate
  modified_base 4: mod_base = OTHER; note = 2'-O-methyladenosine-3'-phosphate
  modified_base 5: mod_base = OTHER; note = 2'-O-methyluridine-3'-phosphate
  modified_base 6: mod_base = OTHER; note = 2'-O-methyladenosine-3'-phosphate
  modified_base 7: mod_base = OTHER; note = 2'-fluorouridine-3'-phosphate
  modified_base 8: mod_base = OTHER; note = 2'-O-methyluridine-3'-phosphate
  modified_base 9: mod_base = OTHER; note = 2'-fluorouridine-3'-phosphate
  modified_base 10: mod_base = OTHER; note = 2'-fluorouridine-3'-phosphate
  modified_base 11: mod_base = OTHER; note = 2'-fluoroadenosine-3'-phosphate
  modified_base 12: mod_base = OTHER; note = 2'-O-methyladenosine-3'-phosphate
  modified_base 13: mod_base = OTHER; note = 2'-O-methylguanosine-3'-phosphate
  modified_base 14: mod_base = OTHER; note = 2'-O-methyladenosine-3'-phosphate
  modified_base 15: mod_base = OTHER; note = 2'-O-methyluridine-3'-phosphate
  modified_base 16: mod_base = OTHER; note = 2'-O-methylguanosine-3'-phosphate
  modified_base 17: mod_base = OTHER; note = 2'-O-methylguanosine-3'-phosphate
  modified_base 18: mod_base = OTHER; note = 2'-O-methyladenosine-3'-phosphate
  modified_base 19: mod_base = OTHER; note = 2'-O-methylcytidine-3'-phosphate
  modified_base 20: mod_base = OTHER; note = 2'-O-methyluridine-3'-phosphate
  modified_base 21: mod_base = OTHER; note 2'-O-methyladenosine-3'-phosphate-N-[tris(GalNAc-alkyl)-ami dodecanoyl)]-4-hydroxyprolinol (Hyp-(GalNAc-alkyl)3)
gtaatattttaagatggacta

SEQ ID NO: 3695 - RNA, 21 nt, synthetic construct
  source 1..21: mol_type = other RNA
  modified_base 1: mod_base = OTHER; note = 2'-O-methyluridine-3'-phosphorothioate
  modified_base 2: mod_base = OTHER; note = 2'-O-methyluridine-3'-phosphorothioate
  modified_base 3: mod_base = OTHER; note = 2'-O-methyluridine-3'-phosphate
  modified_base 4: mod_base = OTHER; note = 2'-O-methyluridine-3'-phosphate
  modified_base 5: mod_base = OTHER; note = 2'-O-methyladenosine-3'-phosphate
  modified_base 6: mod_base = OTHER; note = 2'-O-methyladenosine-3'-phosphate
  modified_base 7: mod_base = OTHER; note = 2'-fluoroguanosine-3'-phosphate
  modified_base 8: mod_base = OTHER; note = 2'-O-methyladenosine-3'-phosphate
  modified_base 9: mod_base = OTHER; note = 2'-fluorouridine-3'-phosphate
  modified_base 10: mod_base = OTHER; note = 2'-fluoroguanosine-3'-phosphate
  modified_base 11: mod_base = OTHER; note = 2'-fluoroguanosine-3'-phosphate
  modified_base 12: mod_base = OTHER; note = 2'-O-methyladenosine-3'-phosphate
  modified_base 13: mod_base = OTHER; note = 2'-O-methylcytidine-3'-phosphate
  modified_base 14: mod_base = OTHER; note = 2'-O-methyluridine-3'-phosphate
  modified_base 15: mod_base = OTHER; note = 2'-O-methylguanosine-3'-phosphate
  modified_base 16: mod_base = OTHER; note = 2'-O-methylguanosine-3'-phosphate
  modified_base 17: mod_base = OTHER; note = 2'-O-methylguanosine-3'-phosphate
  modified_base 18: mod_base = OTHER; note = 2'-O-methyladenosine-3'-phosphate
  modified_base 19: mod_base = OTHER; note = 2'-O-methyladenosine-3'-phosphate
  modified_base 20: mod_base = OTHER; note = 2'-O-methyladenosine-3'-phosphate
  modified_base 21: mod_base = OTHER; note 2'-O-methyladenosine-3'-phosphate-N-[tris(GalNAc-alkyl)-ami dodecanoyl)]-4-hydroxyprolinol (Hyp-(GalNAc-alkyl)3)
ttttaagatggactgggaaaa

SEQ ID NO: 3696 - RNA, 21 nt, synthetic construct
  source 1..21: mol_type = other RNA
  modified_base 1: mod_base = OTHER; note = 2'-O-methyluridine-3'-phosphorothioate
  modified_base 2: mod_base = OTHER; note = 2'-O-methyluridine-3'-phosphorothioate
  modified_base 3: mod_base = OTHER; note = 2'-O-methylcytidine-3'-phosphate
  modified_base 4: mod_base = OTHER; note = 2'-O-methyladenosine-3'-phosphate
  modified_base 5: mod_base = OTHER; note = 2'-O-methylcytidine-3'-phosphate
  modified_base 6: mod_base = OTHER; note = 2'-O-methyluridine-3'-phosphate
  modified_base 7: mod_base = OTHER; note = 2'-fluoroguanosine-3'-phosphate
  modified_base 8: mod_base = OTHER; note = 2'-O-methyladenosine-3'-phosphate
  modified_base 9: mod_base = OTHER; note = 2'-fluoroadenosine-3'-phosphate
  modified_base 10: mod_base = OTHER; note = 2'-fluorocytidine-3'-phosphate
  modified_base 11: mod_base = OTHER; note = 2'-fluoroadenosine-3'-phosphate
  modified_base 12: mod_base = OTHER; note = 2'-O-methyluridine-3'-phosphate
  modified_base 13: mod_base = OTHER; note = 2'-O-methylguanosine-3'-phosphate
  modified_base 14: mod_base = OTHER; note = 2'-O-methylcytidine-3'-phosphate
  modified_base 15: mod_base = OTHER; note = 2'-O-methylcytidine-3'-phosphate
  modified_base 16: mod_base = OTHER; note = 2'-O-methyluridine-3'-phosphate
  modified_base 17: mod_base = OTHER; note = 2'-O-methyladenosine-3'-phosphate
  modified_base 18: mod_base = OTHER; note = 2'-O-methylguanosine-3'-phosphate
  modified_base 19: mod_base = OTHER; note = 2'-O-methyluridine-3'-phosphate
  modified_base 20: mod_base = OTHER; note = 2'-O-methylcytidine-3'-phosphate
  modified_base 21: mod_base = OTHER; note 2'-O-methyladenosine-3'-phosphate-N-[tris(GalNAc-alkyl)-ami dodecanoyl)]-4-hydroxyprolinol (Hyp-(GalNAc-alkyl)3)
ttcactgaacatgcctagtca

SEQ ID NO: 3697 - RNA, 21 nt, synthetic construct
  source 1..21: mol_type = other RNA
  modified_base 1: mod_base = OTHER; note = 2'-O-methyladenosine-3'- phosphorothioate
  modified_base 2: mod_base = OTHER; note = 2'-O-methylcytidine-3'- phosphorothioate
  modified_base 3: mod_base = OTHER; note = 2'-O-methylcytidine-3'-phosphate
  modified_base 4: mod_base = OTHER; note = 2'-O-methyladenosine-3'-phosphate
  modified_base 5: mod_base = OTHER; note = 2'-O-methyladenosine-3'-phosphate
  modified_base 6: mod_base = OTHER; note = 2'-O-methylcytidine-3'-phosphate
  modified_base 7: mod_base = OTHER; note = 2'-fluorouridine-3'-phosphate
  modified_base 8: mod_base = OTHER; note = 2'-O-methyladenosine-3'-phosphate
  modified_base 9: mod_base = OTHER; note = 2'-fluorouridine-3'-phosphate
  modified_base 10: mod_base = OTHER; note = 2'-fluorocytidine-3'-phosphate
  modified_base 11: mod_base = OTHER; note = 2'-fluorocytidine-3'-phosphate
  modified_base 12: mod_base = OTHER; note = 2'-O-methyladenosine-3'-phosphate
  modified_base 13: mod_base = OTHER; note = 2'-O-methyladenosine-3'-phosphate
  modified_base 14: mod_base = OTHER; note = 2'-O-methylguanosine-3'-phosphate
  modified_base 15: mod_base = OTHER; note = 2'-O-methyluridine-3'-phosphate
  modified_base 16: mod_base = OTHER; note = 2'-O-methylguanosine-3'-phosphate
  modified_base 17: mod_base = OTHER; note = 2'-O-methyluridine-3'-phosphate
  modified_base 18: mod_base = OTHER; note = 2'-O-methyluridine-3'-phosphate
  modified_base 19: mod_base = OTHER; note = 2'-O-methyladenosine-3'-phosphate
  modified_base 20: mod_base = OTHER; note = 2'-O-methyluridine-3'-phosphate
  modified_base 21: mod_base = OTHER; note 2'-O-methyladenosine-3'-phosphate-N-[tris(GalNAc-alkyl)-ami dodecanoyl)]-4-hydroxyprolinol (Hyp-(GalNAc-alkyl)3)
accaactatccaagtgttata

SEQ ID NO: 3698 - RNA, 21 nt, synthetic construct
  source 1..21: mol_type = other RNA
  modified_base 1: mod_base = OTHER; note = 2'-O-methylcytidine-3'- phosphorothioate
  modified_base 2: mod_base = OTHER; note = 2'-O-methylcytidine-3'- phosphorothioate
  modified_base 3: mod_base = OTHER; note = 2'-O-methyladenosine-3'-phosphate
  modified_base 4: mod_base = OTHER; note = 2'-O-methyladenosine-3'-phosphate
  modified_base 5: mod_base = OTHER; note = 2'-O-methylguanosine-3'-phosphate
  modified_base 6: mod_base = OTHER; note = 2'-O-methyluridine-3'-phosphate
  modified_base 7: mod_base = OTHER; note = 2'-fluoroguanosine-3'-phosphate
  modified_base 8: mod_base = OTHER; note = 2'-O-methyluridine-3'-phosphate
  modified_base 9: mod_base = OTHER; note = 2'-fluorouridine-3'-phosphate
  modified_base 10: mod_base = OTHER; note = 2'-fluoroadenosine-3'-phosphate
  modified_base 11: mod_base = OTHER; note = 2'-fluorouridine-3'-phosphate
  modified_base 12: mod_base = OTHER; note = 2'-O-methyladenosine-3'-phosphate
  modified_base 13: mod_base = OTHER; note = 2'-O-methylcytidine-3'-phosphate
  modified_base 14: mod_base = OTHER; note = 2'-O-methylcytidine-3'-phosphate
  modified_base 15: mod_base = OTHER; note = 2'-O-methyladenosine-3'-phosphate
  modified_base 16: mod_base = OTHER; note = 2'-O-methyladenosine-3'-phosphate
  modified_base 17: mod_base = OTHER; note = 2'-O-methylcytidine-3'-phosphate
  modified_base 18: mod_base = OTHER; note = 2'-O-methyluridine-3'-phosphate
  modified_base 19: mod_base = OTHER; note = 2'-O-methyladenosine-3'-phosphate
  modified_base 20: mod_base = OTHER; note = 2'-O-methyladenosine-3'-phosphate
  modified_base 21: mod_base = OTHER; note 2'-O-methyladenosine-3'-phosphate-N-[tris(GalNAc-alkyl)-ami dodecanoyl)]-4-hydroxyprolinol (Hyp-(GalNAc-alkyl)3)
ccaagtgttataccaactaaa

SEQ ID NO: 3699 - RNA, 21 nt, synthetic construct
  source 1..21: mol_type = other RNA
  modified_base 1: mod_base = OTHER; note = 2'-O-methyladenosine-3'- phosphorothioate
  modified_base 2: mod_base = OTHER; note = 2'-O-methylguanosine-3'- phosphorothioate
  modified_base 3: mod_base = OTHER; note = 2'-O-methyluridine-3'-phosphate
  modified_base 4: mod_base = OTHER; note = 2'-O-methyladenosine-3'-phosphate
  modified_base 5: mod_base = OTHER; note = 2'-O-methyladenosine-3'-phosphate
  modified_base 6: mod_base = OTHER; note = 2'-O-methyluridine-3'-phosphate
  modified_base 7: mod_base = OTHER; note = 2'-fluoroadenosine-3'-phosphate
  modified_base 8: mod_base = OTHER; note = 2'-O-methyluridine-3'-phosphate
  modified_base 9: mod_base = OTHER; note = 2'-fluorouridine-3'-phosphate
  modified_base 10: mod_base = OTHER; note = 2'-fluorouridine-3'-phosphate
  modified_base 11: mod_base = OTHER; note = 2'-fluorouridine-3'-phosphate
  modified_base 12: mod_base = OTHER; note = 2'-O-methyladenosine-3'-phosphate
  modified_base 13: mod_base = OTHER; note = 2'-O-methyladenosine-3'-phosphate
  modified_base 14: mod_base = OTHER; note = 2'-O-methylguanosine-3'-phosphate
  modified_base 15: mod_base = OTHER; note = 2'-O-methyladenosine-3'-phosphate
  modified_base 16: mod_base = OTHER; note = 2'-O-methyluridine-3'-phosphate
  modified_base 17: mod_base = OTHER; note = 2'-O-methylguanosine-3'-phosphate
  modified_base 18: mod_base = OTHER; note = 2'-O-methylguanosine-3'-phosphate
  modified_base 19: mod_base = OTHER; note = 2'-O-methyladenosine-3'-phosphate
  modified_base 20: mod_base = OTHER; note = 2'-O-methylcytidine-3'-phosphate
  modified_base 21: mod_base = OTHER; note 2'-O-methyluridine-3'-phosphate-N-[tris(GalNAc-alkyl)-amido decanoyl)]-4-hydroxyprolinol (Hyp-(GalNAc-alkyl)3)
agtaatattttaagatggact

SEQ ID NO: 3700 - RNA, 21 nt, synthetic construct
  source 1..21: mol_type = other RNA
  modified_base 1: mod_base = OTHER; note = 2'-O-methyladenosine-3'- phosphorothioate
  modified_base 2: mod_base = OTHER; note = 2'-O-methyladenosine-3'- phosphorothioate
  modified_base 3: mod_base = OTHER; note = 2'-O-methyladenosine-3'-phosphate
  modified_base 4: mod_base = OTHER; note = 2'-O-methyladenosine-3'-phosphate
  modified_base 5: mod_base = OTHER; note = 2'-O-methyluridine-3'-phosphate
  modified_base 6: mod_base = OTHER; note = 2'-O-methylcytidine-3'-phosphate
  modified_base 7: mod_base = OTHER; note = 2'-fluorocytidine-3'-phosphate
  modified_base 8: mod_base = OTHER; note = 2'-O-methyladenosine-3'-phosphate
  modified_base 9: mod_base = OTHER; note = 2'-fluorocytidine-3'-phosphate
  modified_base 10: mod_base = OTHER; note = 2'-fluoroadenosine-3'-phosphate
  modified_base 11: mod_base = OTHER; note = 2'-fluoroguanosine-3'-phosphate
  modified_base 12: mod_base = OTHER; note = 2'-O-methylcytidine-3'-phosphate
  modified_base 13: mod_base = OTHER; note = 2'-O-methyluridine-3'-phosphate
  modified_base 14: mod_base = OTHER; note = 2'-O-methyladenosine-3'-phosphate
  modified_base 15: mod_base = OTHER; note = 2'-O-methyluridine-3'-phosphate
  modified_base 16: mod_base = OTHER; note = 2'-O-methyladenosine-3'-phosphate
  modified_base 17: mod_base = OTHER; note = 2'-O-methyluridine-3'-phosphate
  modified_base 18: mod_base = OTHER; note = 2'-O-methylcytidine-3'-phosphate
  modified_base 19: mod_base = OTHER; note = 2'-O-methylcytidine-3'-phosphate
  modified_base 20: mod_base = OTHER; note = 2'-O-methyluridine-3'-phosphate
  modified_base 21: mod_base = OTHER; note 2'-O-methyladenosine-3'-phosphate-N-[tris(GalNAc-alkyl)-ami dodecanoyl)]-4-hydroxyprolinol (Hyp-(GalNAc-alkyl)3)
aaaatccacagctatatccta

SEQ ID NO: 3701 - RNA, 21 nt, synthetic construct
  source 1..21: mol_type = other RNA
  modified_base 1: mod_base = OTHER; note = 2'-O-methyluridine-3'-phosphorothioate
  modified_base 2: mod_base = OTHER; note = 2'-O-methylcytidine-3'- phosphorothioate
  modified_base 3: mod_base = OTHER; note = 2'-O-methylcytidine-3'-phosphate
  modified_base 4: mod_base = OTHER; note = 2'-O-methyluridine-3'-phosphate
  modified_base 5: mod_base = OTHER; note = 2'-O-methyluridine-3'-phosphate
  modified_base 6: mod_base = OTHER; note = 2'-O-methylcytidine-3'-phosphate
  modified_base 7: mod_base = OTHER; note = 2'-fluoroadenosine-3'-phosphate
  modified_base 8: mod_base = OTHER; note = 2'-O-methylcytidine-3'-phosphate
  modified_base 9: mod_base = OTHER; note = 2'-fluorouridine-3'-phosphate
  modified_base 10: mod_base = OTHER; note = 2'-fluoroguanosine-3'-phosphate
  modified_base 11: mod_base = OTHER; note = 2'-fluoroadenosine-3'-phosphate
  modified_base 12: mod_base = OTHER; note = 2'-O-methyladenosine-3'-phosphate
  modified_base 13: mod_base = OTHER; note = 2'-O-methylcytidine-3'-phosphate
  modified_base 14: mod_base = OTHER; note = 2'-O-methyladenosine-3'-phosphate
  modified_base 15: mod_base = OTHER; note = 2'-O-methyluridine-3'-phosphate
  modified_base 16: mod_base = OTHER; note = 2'-O-methylguanosine-3'-phosphate
  modified_base 17: mod_base = OTHER; note = 2'-O-methylcytidine-3'-phosphate
  modified_base 18: mod_base = OTHER; note = 2'-O-methylcytidine-3'-phosphate
  modified_base 19: mod_base = OTHER; note = 2'-O-methyluridine-3'-phosphate
  modified_base 20: mod_base = OTHER; note = 2'-O-methyladenosine-3'-phosphate
  modified_base 21: mod_base = OTHER; note 2'-O-methyladenosine-3'-phosphate-N-[tris(GalNAc-alkyl)-ami dodecanoyl)]-4-hydroxyprolinol (Hyp-(GalNAc-alkyl)3)
tccttcactgaacatgcctaa

SEQ ID NO: 3702 - RNA, 21 nt, synthetic construct
  source 1..21: mol_type = other RNA
  modified_base 1: mod_base = OTHER; note = 2'-O-methylcytidine-3'- phosphorothioate
  modified_base 2: mod_base = OTHER; note = 2'-O-methyladenosine-3'- phosphorothioate
  modified_base 3: mod_base = OTHER; note = 2'-O-methylcytidine-3'-phosphate
  modified_base 4: mod_base = OTHER; note = 2'-O-methyluridine-3'-phosphate
  modified_base 5: mod_base = OTHER; note = 2'-O-methylguanosine-3'-phosphate
  modified_base 6: mod_base = OTHER; note = 2'-O-methyladenosine-3'-phosphate
  modified_base 7: mod_base = OTHER; note = 2'-fluoroadenosine-3'-phosphate
  modified_base 8: mod_base = OTHER; note = 2'-O-methylcytidine-3'-phosphate
  modified_base 9: mod_base = OTHER; note = 2'-fluoroadenosine-3'-phosphate
  modified_base 10: mod_base = OTHER; note = 2'-fluorouridine-3'-phosphate
  modified_base 11: mod_base = OTHER; note = 2'-fluoroguanosine-3'-phosphate
  modified_base 12: mod_base = OTHER; note = 2'-O-methylcytidine-3'-phosphate
  modified_base 13: mod_base = OTHER; note = 2'-O-methylcytidine-3'-phosphate
  modified_base 14: mod_base = OTHER; note = 2'-O-methyluridine-3'-phosphate
  modified_base 15: mod_base = OTHER; note = 2'-O-methyladenosine-3'-phosphate
  modified_base 16: mod_base = OTHER; note = 2'-O-methylguanosine-3'-phosphate
  modified_base 17: mod_base = OTHER; note = 2'-O-methyluridine-3'-phosphate
  modified_base 18: mod_base = OTHER; note = 2'-O-methylcytidine-3'-phosphate
  modified_base 19: mod_base = OTHER; note = 2'-O-methylcytidine-3'-phosphate
  modified_base 20: mod_base = OTHER; note = 2'-O-methyladenosine-3'-phosphate
  modified_base 21: mod_base = OTHER; note 2'-O-methyladenosine-3'-phosphate-N-[tris(GalNAc-alkyl)-ami dodecanoyl)]-4-hydroxyprolinol (Hyp-(GalNAc-alkyl)3)
cactgaacatgcctagtccaa

SEQ ID NO: 3703 - RNA, 21 nt, synthetic construct
  source 1..21: mol_type = other RNA
  modified_base 1: mod_base = OTHER; note = 2'-O-methyladenosine-3'- phosphorothioate
  modified_base 2: mod_base = OTHER; note = 2'-O-methyladenosine-3'- phosphorothioate
  modified_base 3: mod_base = OTHER; note = 2'-O-methylguanosine-3'-phosphate
  modified_base 4: mod_base = OTHER; note = 2'-O-methyluridine-3'-phosphate
  modified_base 5: mod_base = OTHER; note = 2'-O-methylguanosine-3'-phosphate
  modified_base 6: mod_base = OTHER; note = 2'-O-methyluridine-3'-phosphate
  modified_base 7: mod_base = OTHER; note = 2'-fluorouridine-3'-phosphate
  modified_base 8: mod_base = OTHER; note = 2'-O-methyladenosine-3'-phosphate
  modified_base 9: mod_base = OTHER; note = 2'-fluorouridine-3'-phosphate
  modified_base 10: mod_base = OTHER; note = 2'-fluoroadenosine-3'-phosphate
  modified_base 11: mod_base = OTHER; note = 2'-fluorocytidine-3'-phosphate
  modified_base 12: mod_base = OTHER; note = 2'-O-methylcytidine-3'-phosphate
  modified_base 13: mod_base = OTHER; note = 2'-O-methyladenosine-3'-phosphate
  modified_base 14: mod_base = OTHER; note = 2'-O-methyladenosine-3'-phosphate
  modified_base 15: mod_base = OTHER; note = 2'-O-methylcytidine-3'-phosphate
  modified_base 16: mod_base = OTHER; note = 2'-O-methyluridine-3'-phosphate
  modified_base 17: mod_base = OTHER; note = 2'-O-methyladenosine-3'-phosphate
  modified_base 18: mod_base = OTHER; note = 2'-O-methyladenosine-3'-phosphate
  modified_base 19: mod_base = OTHER; note = 2'-O-methyladenosine-3'-phosphate
  modified_base 20: mod_base = OTHER; note = 2'-O-methyladenosine-3'-phosphate
  modified_base 21: mod_base = OTHER; note 2'-O-methylcytidine-3'-phosphate-N-[tris(GalNAc-alkyl)-amid odecanoyl)]-4-hydroxyprolinol (Hyp-(GalNAc-alkyl)3)
aagtgttataccaactaaaac

SEQ ID NO: 3704 - RNA, 21 nt, synthetic construct
  source 1..21: mol_type = other RNA
  modified_base 1: mod_base = OTHER; note = 2'-O-methyluridine-3'-phosphorothioate
  modified_base 2: mod_base = OTHER; note = 2'-O-methyluridine-3'-phosphorothioate
  modified_base 3: mod_base = OTHER; note = 2'-O-methylcytidine-3'-phosphate
  modified_base 4: mod_base = OTHER; note = 2'-O-methylcytidine-3'-phosphate
  modified_base 5: mod_base = OTHER; note = 2'-O-methyladenosine-3'-phosphate
  modified_base 6: mod_base = OTHER; note = 2'-O-methylcytidine-3'-phosphate
  modified_base 7: mod_base = OTHER; note = 2'-fluorocytidine-3'-phosphate
  modified_base 8: mod_base = OTHER; note = 2'-O-methyladenosine-3'-phosphate
  modified_base 9: mod_base = OTHER; note = 2'-fluorouridine-3'-phosphate
  modified_base 10: mod_base = OTHER; note = 2'-fluoroguanosine-3'-phosphate
  modified_base 11: mod_base = OTHER; note = 2'-fluoroadenosine-3'-phosphate
  modified_base 12: mod_base = OTHER; note = 2'-O-methyluridine-3'-phosphate
  modified_base 13: mod_base = OTHER; note = 2'-O-methyluridine-3'-phosphate
  modified_base 14: mod_base = OTHER; note = 2'-O-methyladenosine-3'-phosphate
  modified_base 15: mod_base = OTHER; note = 2'-O-methyladenosine-3'-phosphate
  modified_base 16: mod_base = OTHER; note = 2'-O-methylguanosine-3'-phosphate
  modified_base 17: mod_base = OTHER; note = 2'-O-methylguanosine-3'-phosphate
  modified_base 18: mod_base = OTHER; note = 2'-O-methylguanosine-3'-phosphate
  modified_base 19: mod_base = OTHER; note = 2'-O-methyluridine-3'-phosphate
  modified_base 20: mod_base = OTHER; note = 2'-O-methylcytidine-3'-phosphate
  modified_base 21: mod_base = OTHER; note 2'-O-methyluridine-3'-phosphate-N-[tris(GalNAc-alkyl)-amido decanoyl)]-4-hydroxyprolinol (Hyp-(GalNAc-alkyl)3)
ttccaccatgattaagggtct

SEQ ID NO: 3705 - RNA, 21 nt, synthetic construct
  source 1..21: mol_type = other RNA
  modified_base 1: mod_base = OTHER; note = 2'-O-methylguanosine-3'- phosphorothioate
  modified_base 2: mod_base = OTHER; note = 2'-O-methyladenosine-3'- phosphorothioate
  modified_base 3: mod_base = OTHER; note = 2'-O-methyladenosine-3'-phosphate
  modified_base 4: mod_base = OTHER; note = 2'-O-methylcytidine-3'-phosphate
  modified_base 5: mod_base = OTHER; note = 2'-O-methyladenosine-3'-phosphate
  modified_base 6: mod_base = OTHER; note = 2'-O-methyluridine-3'-phosphate
  modified_base 7: mod_base = OTHER; note = 2'-fluoroguanosine-3'-phosphate
  modified_base 8: mod_base = OTHER; note = 2'-O-methylcytidine-3'-phosphate
  modified_base 9: mod_base = OTHER; note = 2'-fluorocytidine-3'-phosphate
  modified_base 10: mod_base = OTHER; note = 2'-fluorouridine-3'-phosphate
  modified_base 11: mod_base = OTHER; note = 2'-fluoroadenosine-3'-phosphate
  modified_base 12: mod_base = OTHER; note = 2'-O-methylguanosine-3'-phosphate
  modified_base 13: mod_base = OTHER; note = 2'-O-methyluridine-3'-phosphate
  modified_base 14: mod_base = OTHER; note = 2'-O-methylcytidine-3'-phosphate
  modified_base 15: mod_base = OTHER; note = 2'-O-methylcytidine-3'-phosphate
  modified_base 16: mod_base = OTHER; note = 2'-O-methyladenosine-3'-phosphate
  modified_base 17: mod_base = OTHER; note = 2'-O-methyladenosine-3'-phosphate
  modified_base 18: mod_base = OTHER; note = 2'-O-methylcytidine-3'-phosphate
  modified_base 19: mod_base = OTHER; note = 2'-O-methyladenosine-3'-phosphate
  modified_base 20: mod_base = OTHER; note = 2'-O-methyluridine-3'-phosphate
  modified_base 21: mod_base = OTHER; note 2'-O-methyluridine-3'-phosphate-N-[tris(GalNAc-alkyl)-amido decanoyl)]-4-hydroxyprolinol (Hyp-(GalNAc-alkyl)3)
gaacatgcctagtccaacatt

SEQ ID NO: 3706 - RNA, 21 nt, synthetic construct
  source 1..21: mol_type = other RNA
  modified_base 1: mod_base = OTHER; note = 2'-O-methyladenosine-3'- phosphorothioate
  modified_base 2: mod_base = OTHER; note = 2'-O-methyluridine-3'-phosphorothioate
  modified_base 3: mod_base = OTHER; note = 2'-O-methylcytidine-3'-phosphate
  modified_base 4: mod_base = OTHER; note = 2'-O-methyladenosine-3'-phosphate
  modified_base 5: mod_base = OTHER; note = 2'-O-methylguanosine-3'-phosphate
  modified_base 6: mod_base = OTHER; note = 2'-O-methyluridine-3'-phosphate
  modified_base 7: mod_base = OTHER; note = 2'-fluoroadenosine-3'-phosphate
  modified_base 8: mod_base = OTHER; note = 2'-O-methylguanosine-3'-phosphate
  modified_base 9: mod_base = OTHER; note = 2'-fluorouridine-3'-phosphate
  modified_base 10: mod_base = OTHER; note = 2'-fluoroguanosine-3'-phosphate
  modified_base 11: mod_base = OTHER; note = 2'-fluorouridine-3'-phosphate
  modified_base 12: mod_base = OTHER; note = 2'-O-methyladenosine-3'-phosphate
  modified_base 13: mod_base = OTHER; note = 2'-O-methylcytidine-3'-phosphate
  modified_base 14: mod_base = OTHER; note = 2'-O-methyladenosine-3'-phosphate
  modified_base 15: mod_base = OTHER; note = 2'-O-methyluridine-3'-phosphate
  modified_base 16: mod_base = OTHER; note = 2'-O-methyluridine-3'-phosphate
  modified_base 17: mod_base = OTHER; note = 2'-O-methyladenosine-3'-phosphate
  modified_base 18: mod_base = OTHER; note = 2'-O-methylcytidine-3'-phosphate
  modified_base 19: mod_base = OTHER; note = 2'-O-methylcytidine-3'-phosphate
  modified_base 20: mod_base = OTHER; note = 2'-O-methyladenosine-3'-phosphate
  modified_base 21: mod_base = OTHER; note 2'-O-methyluridine-3'-phosphate-N-[tris(GalNAc-alkyl)-amido decanoyl)]-4-hydroxyprolinol (Hyp-(GalNAc-alkyl)3)
atcagtagtgtacattaccat

SEQ ID NO: 3707 - RNA, 21 nt, synthetic construct
  source 1..21: mol_type = other RNA
  modified_base 1: mod_base = OTHER; note = 2'-O-methyladenosine-3'- phosphorothioate
  modified_base 2: mod_base = OTHER; note = 2'-O-methyluridine-3'-phosphorothioate
  modified_base 3: mod_base = OTHER; note = 2'-O-methylcytidine-3'-phosphate
  modified_base 4: mod_base = OTHER; note = 2'-O-methylcytidine-3'-phosphate
  modified_base 5: mod_base = OTHER; note = 2'-O-methyladenosine-3'-phosphate
  modified_base 6: mod_base = OTHER; note = 2'-O-methyladenosine-3'-phosphate
  modified_base 7: mod_base = OTHER; note = 2'-fluoroguanosine-3'-phosphate
  modified_base 8: mod_base = OTHER; note = 2'-O-methyluridine-3'-phosphate
  modified_base 9: mod_base = OTHER; note = 2'-fluoroguanosine-3'-phosphate
  modified_base 10: mod_base = OTHER; note = 2'-fluorouridine-3'-phosphate
  modified_base 11: mod_base = OTHER; note = 2'-fluorouridine-3'-phosphate
  modified_base 12: mod_base = OTHER; note = 2'-O-methyladenosine-3'-phosphate
  modified_base 13: mod_base = OTHER; note = 2'-O-methyluridine-3'-phosphate
  modified_base 14: mod_base = OTHER; note = 2'-O-methyladenosine-3'-phosphate
  modified_base 15: mod_base = OTHER; note = 2'-O-methylcytidine-3'-phosphate
  modified_base 16: mod_base = OTHER; note = 2'-O-methylcytidine-3'-phosphate
  modified_base 17: mod_base = OTHER; note = 2'-O-methyladenosine-3'-phosphate
  modified_base 18: mod_base = OTHER; note = 2'-O-methyladenosine-3'-phosphate
  modified_base 19: mod_base = OTHER; note = 2'-O-methylcytidine-3'-phosphate
  modified_base 20: mod_base = OTHER; note = 2'-O-methyluridine-3'-phosphate
  modified_base 21: mod_base = OTHER; note 2'-O-methyladenosine-3'-phosphate-N-[tris(GalNAc-alkyl)-ami dodecanoyl)]-4-hydroxyprolinol (Hyp-(GalNAc-alkyl)3)
atccaagtgttataccaacta

SEQ ID NO: 3708 - RNA, 21 nt, synthetic construct
  source 1..21: mol_type = other RNA
  modified_base 1: mod_base = OTHER; note = 2'-O-methylcytidine-3'- phosphorothioate
  modified_base 2: mod_base = OTHER; note = 2'-O-methylcytidine-3'- phosphorothioate
  modified_base 3: mod_base = OTHER; note = 2'-O-methyladenosine-3'-phosphate
  modified_base 4: mod_base = OTHER; note = 2'-O-methyladenosine-3'-phosphate
  modified_base 5: mod_base = OTHER; note = 2'-O-methylguanosine-3'-phosphate
  modified_base 6: mod_base = OTHER; note = 2'-O-methyluridine-3'-phosphate
  modified_base 7: mod_base = OTHER; note = 2'-fluorocytidine-3'-phosphate
  modified_base 8: mod_base = OTHER; note = 2'-O-methylcytidine-3'-phosphate
  modified_base 9: mod_base = OTHER; note = 2'-fluoroadenosine-3'-phosphate
  modified_base 10: mod_base = OTHER; note = 2'-fluoroadenosine-3'-phosphate
  modified_base 11: mod_base = OTHER; note = 2'-fluorouridine-3'-phosphate
  modified_base 12: mod_base = OTHER; note = 2'-O-methyladenosine-3'-phosphate
  modified_base 13: mod_base = OTHER; note = 2'-O-methyluridine-3'-phosphate
  modified_base 14: mod_base = OTHER; note = 2'-O-methylguanosine-3'-phosphate
  modified_base 15: mod_base = OTHER; note = 2'-O-methylguanosine-3'-phosphate
  modified_base 16: mod_base = OTHER; note = 2'-O-methylcytidine-3'-phosphate
  modified_base 17: mod_base = OTHER; note = 2'-O-methyladenosine-3'-phosphate
  modified_base 18: mod_base = OTHER; note = 2'-O-methyladenosine-3'-phosphate
  modified_base 19: mod_base = OTHER; note = 2'-O-methylcytidine-3'-phosphate
  modified_base 20: mod_base = OTHER; note = 2'-O-methyluridine-3'-phosphate
  modified_base 21: mod_base = OTHER; note 2'-O-methyladenosine-3'-phosphate-N-[tris(GalNAc-alkyl)-ami dodecanoyl)]-4-hydroxyprolinol (Hyp-(GalNAc-alkyl)3)
ccaagtccaatatggcaacta

SEQ ID NO: 3709 - RNA, 21 nt, synthetic construct
  source 1..21: mol_type = other RNA
  modified_base 1: mod_base = OTHER; note = 2'-O-methylcytidine-3'- phosphorothioate
  modified_base 2: mod_base = OTHER; note = 2'-O-methyladenosine-3'- phosphorothioate
  modified_base 3: mod_base = OTHER; note = 2'-O-methyluridine-3'-phosphate
  modified_base 4: mod_base = OTHER; note = 2'-O-methyluridine-3'-phosphate
  modified_base 5: mod_base = OTHER; note = 2'-O-methyluridine-3'-phosphate
  modified_base 6: mod_base = OTHER; note = 2'-O-methylcytidine-3'-phosphate
  modified_base 7: mod_base = OTHER; note = 2'-fluoroadenosine-3'-phosphate
  modified_base 8: mod_base = OTHER; note = 2'-O-methylcytidine-3'-phosphate
  modified_base 9: mod_base = OTHER; note = 2'-fluorouridine-3'-phosphate
  modified_base 10: mod_base = OTHER; note = 2'-fluoroguanosine-3'-phosphate
  modified_base 11: mod_base = OTHER; note = 2'-fluorouridine-3'-phosphate
  modified_base 12: mod_base = OTHER; note = 2'-O-methylcytidine-3'-phosphate
  modified_base 13: mod_base = OTHER; note = 2'-O-methyluridine-3'-phosphate
  modified_base 14: mod_base = OTHER; note = 2'-O-methyladenosine-3'-phosphate
  modified_base 15: mod_base = OTHER; note = 2'-O-methylguanosine-3'-phosphate
  modified_base 16: mod_base = OTHER; note = 2'-O-methylguanosine-3'-phosphate
  modified_base 17: mod_base = OTHER; note = 2'-O-methylcytidine-3'-phosphate
  modified_base 18: mod_base = OTHER; note = 2'-O-methyluridine-3'-phosphate
  modified_base 19: mod_base = OTHER; note = 2'-O-methyladenosine-3'-phosphate
  modified_base 20: mod_base = OTHER; note = 2'-O-methylcytidine-3'-phosphate
  modified_base 21: mod_base = OTHER; note 2'-O-methyladenosine-3'-phosphate-N-[tris(GalNAc-alkyl)-ami dodecanoyl)]-4-hydroxyprolinol (Hyp-(GalNAc-alkyl)3)
catttcactgtctaggctaca

SEQ ID NO: 3710 - RNA, 21 nt, synthetic construct
  source 1..21: mol_type = other RNA
  modified_base 1: mod_base = OTHER; note = 2'-O-methylcytidine-3'- phosphorothioate
  modified_base 2: mod_base = OTHER; note = 2'-O-methylcytidine-3'- phosphorothioate
  modified_base 3: mod_base = OTHER; note = 2'-O-methyladenosine-3'-phosphate
  modified_base 4: mod_base = OTHER; note = 2'-O-methylcytidine-3'-phosphate
  modified_base 5: mod_base = OTHER; note = 2'-O-methyladenosine-3'-phosphate
  modified_base 6: mod_base = OTHER; note = 2'-O-methylguanosine-3'-phosphate
  modified_base 7: mod_base = OTHER; note = 2'-fluorocytidine-3'-phosphate
  modified_base 8: mod_base = OTHER; note = 2'-O-methyluridine-3'-phosphate
  modified_base 9: mod_base = OTHER; note = 2'-fluoroadenosine-3'-phosphate
  modified_base 10: mod_base = OTHER; note = 2'-fluorouridine-3'-phosphate
  modified_base 11: mod_base = OTHER; note = 2'-fluoroadenosine-3'-phosphate
  modified_base 12: mod_base = OTHER; note = 2'-O-methyluridine-3'-phosphate
  modified_base 13: mod_base = OTHER; note = 2'-O-methylcytidine-3'-phosphate
  modified_base 14: mod_base = OTHER; note = 2'-O-methylcytidine-3'-phosphate
  modified_base 15: mod_base = OTHER; note = 2'-O-methyluridine-3'-phosphate
  modified_base 16: mod_base = OTHER; note = 2'-O-methylguanosine-3'-phosphate
  modified_base 17: mod_base = OTHER; note = 2'-O-methyladenosine-3'-phosphate
  modified_base 18: mod_base = OTHER; note = 2'-O-methyluridine-3'-phosphate
  modified_base 19: mod_base = OTHER; note = 2'-O-methylguanosine-3'-phosphate
  modified_base 20: mod_base = OTHER; note = 2'-O-methylcytidine-3'-phosphate
  modified_base 21: mod_base = OTHER; note 2'-O-methyluridine-3'-phosphate-N-[tris(GalNAc-alkyl)-amido decanoyl)]-4-hydroxyprolinol (Hyp-(GalNAc-alkyl)3)
ccacagctatatcctgatgct

SEQ ID NO: 3711 - RNA, 21 nt, synthetic construct
  source 1..21: mol_type = other RNA
  modified_base 1: mod_base = OTHER; note = 2'-O-methylcytidine-3'- phosphorothioate
  modified_base 2: mod_base = OTHER; note = 2'-O-methyluridine-3'-phosphorothioate
  modified_base 3: mod_base = OTHER; note = 2'-O-methyluridine-3'-phosphate
  modified_base 4: mod_base = OTHER; note = 2'-O-methylcytidine-3'-phosphate
  modified_base 5: mod_base = OTHER; note = 2'-O-methyladenosine-3'-phosphate
  modified_base 6: mod_base = OTHER; note = 2'-O-methylcytidine-3'-phosphate
  modified_base 7: mod_base = OTHER; note = 2'-fluorouridine-3'-phosphate
  modified_base 8: mod_base = OTHER; note = 2'-O-methylguanosine-3'-phosphate
  modified_base 9: mod_base = OTHER; note = 2'-fluoroadenosine-3'-phosphate
  modified_base 10: mod_base = OTHER; note = 2'-fluoroadenosine-3'-phosphate
  modified_base 11: mod_base = OTHER; note = 2'-fluorocytidine-3'-phosphate
  modified_base 12: mod_base = OTHER; note = 2'-O-methyladenosine-3'-phosphate
  modified_base 13: mod_base = OTHER; note = 2'-O-methyluridine-3'-phosphate
  modified_base 14: mod_base = OTHER; note = 2'-O-methylguanosine-3'-phosphate
  modified_base 15: mod_base = OTHER; note = 2'-O-methylcytidine-3'-phosphate
  modified_base 16: mod_base = OTHER; note = 2'-O-methylcytidine-3'-phosphate
  modified_base 17: mod_base = OTHER; note = 2'-O-methyluridine-3'-phosphate
  modified_base 18: mod_base = OTHER; note = 2'-O-methyladenosine-3'-phosphate
  modified_base 19: mod_base = OTHER; note = 2'-O-methylguanosine-3'-phosphate
  modified_base 20: mod_base = OTHER; note = 2'-O-methyluridine-3'-phosphate
  modified_base 21: mod_base = OTHER; note 2'-O-methyladenosine-3'-phosphate-N-[tris(GalNAc-alkyl)-ami dodecanoyl)]-4-hydroxyprolinol (Hyp-(GalNAc-alkyl)3)
cttcactgaacatgcctagta

SEQ ID NO: 3712 - RNA, 21 nt, synthetic construct
  source 1..21: mol_type = other RNA
  modified_base 1: mod_base = OTHER; note = 2'-O-methylguanosine-3'- phosphorothioate
  modified_base 2: mod_base = OTHER; note = 2'-O-methyluridine-3'-phosphorothioate
  modified_base 3: mod_base = OTHER; note = 2'-O-methylguanosine-3'-phosphate
  modified_base 4: mod_base = OTHER; note = 2'-O-methylguanosine-3'-phosphate
  modified_base 5: mod_base = OTHER; note = 2'-O-methyluridine-3'-phosphate
  modified_base 6: mod_base = OTHER; note = 2'-O-methyluridine-3'-phosphate
  modified_base 7: mod_base = OTHER; note = 2'-fluoroguanosine-3'-phosphate
  modified_base 8: mod_base = OTHER; note = 2'-O-methyladenosine-3'-phosphate
  modified_base 9: mod_base = OTHER; note = 2'-fluoroguanosine-3'-phosphate
  modified_base 10: mod_base = OTHER; note = 2'-fluoroadenosine-3'-phosphate
  modified_base 11: mod_base = OTHER; note = 2'-fluoroguanosine-3'-phosphate
  modified_base 12: mod_base = OTHER; note = 2'-O-methyluridine-3'-phosphate
  modified_base 13: mod_base = OTHER; note = 2'-O-methylguanosine-3'-phosphate
  modified_base 14: mod_base = OTHER; note = 2'-O-methylcytidine-3'-phosphate
  modified_base 15: mod_base = OTHER; note = 2'-O-methyluridine-3'-phosphate
  modified_base 16: mod_base = OTHER; note = 2'-O-methyluridine-3'-phosphate
  modified_base 17: mod_base = OTHER; note = 2'-O-methyladenosine-3'-phosphate
  modified_base 18: mod_base = OTHER; note = 2'-O-methyluridine-3'-phosphate
  modified_base 19: mod_base = OTHER; note = 2'-O-methylguanosine-3'-phosphate
  modified_base 20: mod_base = OTHER; note = 2'-O-methyladenosine-3'-phosphate
  modified_base 21: mod_base = OTHER; note 2'-O-methyladenosine-3'-phosphate-N-[tris(GalNAc-alkyl)-ami dodecanoyl)]-4-hydroxyprolinol (Hyp-(GalNAc-alkyl)3)
gtggttgagagtgcttatgaa

SEQ ID NO: 3713 - RNA, 21 nt, synthetic construct
  source 1..21: mol_type = other RNA
  modified_base 1: mod_base = OTHER; note = 2'-O-methyladenosine-3'- phosphorothioate
  modified_base 2: mod_base = OTHER; note = 2'-O-methyluridine-3'-phosphorothioate
  modified_base 3: mod_base = OTHER; note = 2'-O-methyladenosine-3'-phosphate
  modified_base 4: mod_base = OTHER; note = 2'-O-methyluridine-3'-phosphate
  modified_base 5: mod_base = OTHER; note = 2'-O-methylcytidine-3'-phosphate
  modified_base 6: mod_base = OTHER; note = 2'-O-methyladenosine-3'-phosphate
  modified_base 7: mod_base = OTHER; note = 2'-fluoroguanosine-3'-phosphate
  modified_base 8: mod_base = OTHER; note = 2'-O-methyluridine-3'-phosphate
  modified_base 9: mod_base = OTHER; note = 2'-fluoroadenosine-3'-phosphate
  modified_base 10: mod_base = OTHER; note = 2'-fluoroguanosine-3'-phosphate
  modified_base 11: mod_base = OTHER; note = 2'-fluorouridine-3'-phosphate
  modified_base 12: mod_base = OTHER; note = 2'-O-methylguanosine-3'-phosphate
  modified_base 13: mod_base = OTHER; note = 2'-O-methyluridine-3'-phosphate
  modified_base 14: mod_base = OTHER; note = 2'-O-methyladenosine-3'-phosphate
  modified_base 15: mod_base = OTHER; note = 2'-O-methylcytidine-3'-phosphate
  modified_base 16: mod_base = OTHER; note = 2'-O-methyladenosine-3'-phosphate
  modified_base 17: mod_base = OTHER; note = 2'-O-methyluridine-3'-phosphate
  modified_base 18: mod_base = OTHER; note = 2'-O-methyluridine-3'-phosphate
  modified_base 19: mod_base = OTHER; note = 2'-O-methyladenosine-3'-phosphate
  modified_base 20: mod_base = OTHER; note = 2'-O-methylcytidine-3'-phosphate
  modified_base 21: mod_base = OTHER; note 2'-O-methyladenosine-3'-phosphate-N-[tris(GalNAc-alkyl)-ami dodecanoyl)]-4-hydroxyprolinol (Hyp-(GalNAc-alkyl)3)
atatcagtagtgtacattaca

SEQ ID NO: 3714 - RNA, 21 nt, synthetic construct
  source 1..21: mol_type = other RNA
  modified_base 1: mod_base = OTHER; note = 2'-O-methylcytidine-3'- phosphorothioate
  modified_base 2: mod_base = OTHER; note = 2'-O-methyladenosine-3'- phosphorothioate
  modified_base 3: mod_base = OTHER; note = 2'-O-methyladenosine-3'-phosphate
  modified_base 4: mod_base = OTHER; note = 2'-O-methylcytidine-3'-phosphate
  modified_base 5: mod_base = OTHER; note = 2'-O-methylcytidine-3'-phosphate
  modified_base 6: mod_base = OTHER; note = 2'-O-methyladenosine-3'-phosphate
  modified_base 7: mod_base = OTHER; note = 2'-fluoroadenosine-3'-phosphate
  modified_base 8: mod_base = OTHER; note = 2'-O-methylcytidine-3'-phosphate
  modified_base 9: mod_base = OTHER; note = 2'-fluorouridine-3'-phosphate
  modified_base 10: mod_base = OTHER; note = 2'-fluoroadenosine-3'-phosphate
  modified_base 11: mod_base = OTHER; note = 2'-fluorouridine-3'-phosphate
  modified_base 12: mod_base = OTHER; note = 2'-O-methylcytidine-3'-phosphate
  modified_base 13: mod_base = OTHER; note = 2'-O-methylcytidine-3'-phosphate
  modified_base 14: mod_base = OTHER; note = 2'-O-methyladenosine-3'-phosphate
  modified_base 15: mod_base = OTHER; note = 2'-O-methyladenosine-3'-phosphate
  modified_base 16: mod_base = OTHER; note = 2'-O-methylguanosine-3'-phosphate
  modified_base 17: mod_base = OTHER; note = 2'-O-methyluridine-3'-phosphate
  modified_base 18: mod_base = OTHER; note = 2'-O-methylguanosine-3'-phosphate
  modified_base 19: mod_base = OTHER; note = 2'-O-methyluridine-3'-phosphate
  modified_base 20: mod_base = OTHER; note = 2'-O-methyluridine-3'-phosphate
  modified_base 21: mod_base = OTHER; note 2'-O-methyladenosine-3'-phosphate-N-[tris(GalNAc-alkyl)-ami dodecanoyl)]-4-hydroxyprolinol (Hyp-(GalNAc-alkyl)3)
caaccaactatccaagtgtta

SEQ ID NO: 3715 - RNA, 21 nt, synthetic construct
  source 1..21: mol_type = other RNA
  modified_base 1: mod_base = OTHER; note = 2'-O-methylguanosine-3'- phosphorothioate
  modified_base 2: mod_base = OTHER; note = 2'-O-methylcytidine-3'- phosphorothioate
  modified_base 3: mod_base = OTHER; note = 2'-O-methyladenosine-3'-phosphate
  modified_base 4: mod_base = OTHER; note = 2'-O-methylguanosine-3'-phosphate
  modified_base 5: mod_base = OTHER; note = 2'-O-methyladenosine-3'-phosphate
  modified_base 6: mod_base = OTHER; note = 2'-O-methyluridine-3'-phosphate
  modified_base 7: mod_base = OTHER; note = 2'-fluorouridine-3'-phosphate
  modified_base 8: mod_base = OTHER; note = 2'-O-methyluridine-3'-phosphate
  modified_base 9: mod_base = OTHER; note = 2'-fluoroguanosine-3'-phosphate
  modified_base 10: mod_base = OTHER; note = 2'-fluoroguanosine-3'-phosphate
  modified_base 11: mod_base = OTHER; note = 2'-fluorocytidine-3'-phosphate
  modified_base 12: mod_base = OTHER; note = 2'-O-methyladenosine-3'-phosphate
  modified_base 13: mod_base = OTHER; note = 2'-O-methylguanosine-3'-phosphate
  modified_base 14: mod_base = OTHER; note = 2'-O-methyladenosine-3'-phosphate
  modified_base 15: mod_base = OTHER; note = 2'-O-methylguanosine-3'-phosphate
  modified_base 16: mod_base = OTHER; note = 2'-O-methyladenosine-3'-phosphate
  modified_base 17: mod_base = OTHER; note = 2'-O-methylguanosine-3'-phosphate
  modified_base 18: mod_base = OTHER; note = 2'-O-methyluridine-3'-phosphate
  modified_base 19: mod_base = OTHER; note = 2'-O-methyladenosine-3'-phosphate
  modified_base 20: mod_base = OTHER; note = 2'-O-methyluridine-3'-phosphate
  modified_base 21: mod_base = OTHER; note 2'-O-methyladenosine-3'-phosphate-N-[tris(GalNAc-alkyl)-ami dodecanoyl)]-4-hydroxyprolinol (Hyp-(GalNAc-alkyl)3)
gcagatttggcagagagtata

SEQ ID NO: 3716 - RNA, 21 nt, synthetic construct
  source 1..21: mol_type = other RNA
  modified_base 1: mod_base = OTHER; note = 2'-O-methylcytidine-3'- phosphorothioate
  modified_base 2: mod_base = OTHER; note = 2'-O-methyluridine-3'-phosphorothioate
  modified_base 3: mod_base = OTHER; note = 2'-O-methylcytidine-3'-phosphate
  modified_base 4: mod_base = OTHER; note = 2'-O-methylcytidine-3'-phosphate
  modified_base 5: mod_base = OTHER; note = 2'-O-methyluridine-3'-phosphate
  modified_base 6: mod_base = OTHER; note = 2'-O-methyluridine-3'-phosphate
  modified_base 7: mod_base = OTHER; note = 2'-fluorocytidine-3'-phosphate
  modified_base 8: mod_base = OTHER; note = 2'-O-methyladenosine-3'-phosphate
  modified_base 9: mod_base = OTHER; note = 2'-fluorocytidine-3'-phosphate
  modified_base 10: mod_base = OTHER; note = 2'-fluorouridine-3'-phosphate
  modified_base 11: mod_base = OTHER; note = 2'-fluoroguanosine-3'-phosphate
  modified_base 12: mod_base = OTHER; note = 2'-O-methyladenosine-3'-phosphate
  modified_base 13: mod_base = OTHER; note = 2'-O-methyladenosine-3'-phosphate
  modified_base 14: mod_base = OTHER; note = 2'-O-methylcytidine-3'-phosphate
  modified_base 15: mod_base = OTHER; note = 2'-O-methyladenosine-3'-phosphate
  modified_base 16: mod_base = OTHER; note = 2'-O-methyluridine-3'-phosphate
  modified_base 17: mod_base = OTHER; note = 2'-O-methylguanosine-3'-phosphate
  modified_base 18: mod_base = OTHER; note = 2'-O-methylcytidine-3'-phosphate
  modified_base 19: mod_base = OTHER; note = 2'-O-methylcytidine-3'-phosphate
  modified_base 20: mod_base = OTHER; note = 2'-O-methyluridine-3'-phosphate
  modified_base 21: mod_base = OTHER; note 2'-O-methyladenosine-3'-phosphate-N-[tris(GalNAc-alkyl)-ami dodecanoyl)]-4-hydroxyprolinol (Hyp-(GalNAc-alkyl)3)
ctccttcactgaacatgccta

SEQ ID NO: 3717 - RNA, 21 nt, synthetic construct
  source 1..21: mol_type = other RNA
  modified_base 1: mod_base = OTHER; note = 2'-O-methylcytidine-3'- phosphorothioate
  modified_base 2: mod_base = OTHER; note = 2'-O-methyladenosine-3'- phosphorothioate
  modified_base 3: mod_base = OTHER; note = 2'-O-methyluridine-3'-phosphate
  modified_base 4: mod_base = OTHER; note = 2'-O-methylguanosine-3'-phosphate
  modified_base 5: mod_base = OTHER; note = 2'-O-methylcytidine-3'-phosphate
  modified_base 6: mod_base = OTHER; note = 2'-O-methylcytidine-3'-phosphate
  modified_base 7: mod_base = OTHER; note = 2'-fluorouridine-3'-phosphate
  modified_base 8: mod_base = OTHER; note = 2'-O-methyladenosine-3'-phosphate
  modified_base 9: mod_base = OTHER; note = 2'-fluoroguanosine-3'-phosphate
  modified_base 10: mod_base = OTHER; note = 2'-fluorouridine-3'-phosphate
  modified_base 11: mod_base = OTHER; note = 2'-fluorocytidine-3'-phosphate
  modified_base 12: mod_base = OTHER; note = 2'-O-methylcytidine-3'-phosphate
  modified_base 13: mod_base = OTHER; note = 2'-O-methyladenosine-3'-phosphate
  modified_base 14: mod_base = OTHER; note = 2'-O-methyladenosine-3'-phosphate
  modified_base 15: mod_base = OTHER; note = 2'-O-methylcytidine-3'-phosphate
  modified_base 16: mod_base = OTHER; note = 2'-O-methyladenosine-3'-phosphate
  modified_base 17: mod_base = OTHER; note = 2'-O-methyluridine-3'-phosphate
  modified_base 18: mod_base = OTHER; note = 2'-O-methyluridine-3'-phosphate
  modified_base 19: mod_base = OTHER; note = 2'-O-methyluridine-3'-phosphate
  modified_base 20: mod_base = OTHER; note = 2'-O-methyluridine-3'-phosphate
  modified_base 21: mod_base = OTHER; note 2'-O-methyluridine-3'-phosphate-N-[tris(GalNAc-alkyl)-amido decanoyl)]-4-hydroxyprolinol (Hyp-(GalNAc-alkyl)3)
catgcctagtccaacattttt

SEQ ID NO: 3718 - RNA, 21 nt, synthetic construct
  source 1..21: mol_type = other RNA
  modified_base 1: mod_base = OTHER; note = 2'-O-methyluridine-3'-phosphorothioate
  modified_base 2: mod_base = OTHER; note = 2'-O-methylguanosine-3'- phosphorothioate
  modified_base 3: mod_base = OTHER; note = 2'-O-methylcytidine-3'-phosphate
  modified_base 4: mod_base = OTHER; note = 2'-O-methylcytidine-3'-phosphate
  modified_base 5: mod_base = OTHER; note = 2'-O-methyladenosine-3'-phosphate
  modified_base 6: mod_base = OTHER; note = 2'-O-methyluridine-3'-phosphate
  modified_base 7: mod_base = OTHER; note = 2'-fluorocytidine-3'-phosphate
  modified_base 8: mod_base = OTHER; note = 2'-O-methyladenosine-3'-phosphate
  modified_base 9: mod_base = OTHER; note = 2'-fluoroguanosine-3'-phosphate
  modified_base 10: mod_base = OTHER; note = 2'-fluorouridine-3'-phosphate
  modified_base 11: mod_base = OTHER; note = 2'-fluoroadenosine-3'-phosphate
  modified_base 12: mod_base = OTHER; note = 2'-O-methyluridine-3'-phosphate
  modified_base 13: mod_base = OTHER; note = 2'-O-methylcytidine-3'-phosphate
  modified_base 14: mod_base = OTHER; note = 2'-O-methyluridine-3'-phosphate
  modified_base 15: mod_base = OTHER; note = 2'-O-methyluridine-3'-phosphate
  modified_base 16: mod_base = OTHER; note = 2'-O-methyladenosine-3'-phosphate
  modified_base 17: mod_base = OTHER; note = 2'-O-methyladenosine-3'-phosphate
  modified_base 18: mod_base = OTHER; note = 2'-O-methyluridine-3'-phosphate
  modified_base 19: mod_base = OTHER; note = 2'-O-methylguanosine-3'-phosphate
  modified_base 20: mod_base = OTHER; note = 2'-O-methyladenosine-3'-phosphate
  modified_base 21: mod_base = OTHER; note 2'-O-methyladenosine-3'-phosphate-N-[tris(GalNAc-alkyl)-ami dodecanoyl)]-4-hydroxyprolinol (Hyp-(GalNAc-alkyl)3)
tgccatcagtatcttaatgaa

SEQ ID NO: 3719 - RNA, 21 nt, synthetic construct
  source 1..21: mol_type = other RNA
  modified_base 1: mod_base = OTHER; note = 2'-O-methylguanosine-3'- phosphorothioate
  modified_base 2: mod_base = OTHER; note = 2'-O-methylcytidine-3'- phosphorothioate
  modified_base 3: mod_base = OTHER; note = 2'-O-methylcytidine-3'-phosphate
  modified_base 4: mod_base = OTHER; note = 2'-O-methyladenosine-3'-phosphate
  modified_base 5: mod_base = OTHER; note = 2'-O-methyluridine-3'-phosphate
  modified_base 6: mod_base = OTHER; note = 2'-O-methylcytidine-3'-phosphate
  modified_base 7: mod_base = OTHER; note = 2'-fluoroadenosine-3'-phosphate
  modified_base 8: mod_base = OTHER; note = 2'-O-methylguanosine-3'-phosphate
  modified_base 9: mod_base = OTHER; note = 2'-fluorouridine-3'-phosphate
  modified_base 10: mod_base = OTHER; note = 2'-fluoroadenosine-3'-phosphate
  modified_base 11: mod_base = OTHER; note = 2'-fluorouridine-3'-phosphate
  modified_base 12: mod_base = OTHER; note = 2'-O-methylcytidine-3'-phosphate
  modified_base 13: mod_base = OTHER; note = 2'-O-methyluridine-3'-phosphate
  modified_base 14: mod_base = OTHER; note = 2'-O-methyluridine-3'-phosphate
  modified_base 15: mod_base = OTHER; note = 2'-O-methyladenosine-3'-phosphate
  modified_base 16: mod_base = OTHER; note = 2'-O-methyladenosine-3'-phosphate
  modified_base 17: mod_base = OTHER; note = 2'-O-methyluridine-3'-phosphate
  modified_base 18: mod_base = OTHER; note = 2'-O-methylguanosine-3'-phosphate
  modified_base 19: mod_base = OTHER; note = 2'-O-methyladenosine-3'-phosphate
  modified_base 20: mod_base = OTHER; note = 2'-O-methyladenosine-3'-phosphate
  modified_base 21: mod_base = OTHER; note 2'-O-methyladenosine-3'-phosphate-N-[tris(GalNAc-alkyl)-ami dodecanoyl)]-4-hydroxyprolinol (Hyp-(GalNAc-alkyl)3)
gccatcagtatcttaatgaaa

SEQ ID NO: 3720 - RNA, 21 nt, synthetic construct
  source 1..21: mol_type = other RNA
  modified_base 1: mod_base = OTHER; note = 2'-O-methyluridine-3'-phosphorothioate
  modified_base 2: mod_base = OTHER; note = 2'-O-methyluridine-3'-phosphorothioate
  modified_base 3: mod_base = OTHER; note = 2'-O-methyladenosine-3'-phosphate
  modified_base 4: mod_base = OTHER; note = 2'-O-methylguanosine-3'-phosphate
  modified_base 5: mod_base = OTHER; note = 2'-O-methyladenosine-3'-phosphate
  modified_base 6: mod_base = OTHER; note = 2'-O-methyladenosine-3'-phosphate
  modified_base 7: mod_base = OTHER; note = 2'-fluorocytidine-3'-phosphate
  modified_base 8: mod_base = OTHER; note = 2'-O-methyladenosine-3'-phosphate
  modified_base 9: mod_base = OTHER; note = 2'-fluorocytidine-3'-phosphate
  modified_base 10: mod_base = OTHER; note = 2'-fluorocytidine-3'-phosphate
  modified_base 11: mod_base = OTHER; note = 2'-fluoroadenosine-3'-phosphate
  modified_base 12: mod_base = OTHER; note = 2'-O-methyladenosine-3'-phosphate
  modified_base 13: mod_base = OTHER; note = 2'-O-methyladenosine-3'-phosphate
  modified_base 14: mod_base = OTHER; note = 2'-O-methylguanosine-3'-phosphate
  modified_base 15: mod_base = OTHER; note = 2'-O-methyladenosine-3'-phosphate
  modified_base 16: mod_base = OTHER; note = 2'-O-methyluridine-3'-phosphate
  modified_base 17: mod_base = OTHER; note = 2'-O-methyluridine-3'-phosphate
  modified_base 18: mod_base = OTHER; note = 2'-O-methylguanosine-3'-phosphate
  modified_base 19: mod_base = OTHER; note = 2'-O-methyluridine-3'-phosphate
  modified_base 20: mod_base = OTHER; note = 2'-O-methylcytidine-3'-phosphate
  modified_base 21: mod_base = OTHER; note 2'-O-methyluridine-3'-phosphate-N-[tris(GalNAc-alkyl)-amido decanoyl)]-4-hydroxyprolinol (Hyp-(GalNAc-alkyl)3)
ttagaacaccaaagattgtct

SEQ ID NO: 3721 - RNA, 21 nt, synthetic construct
  source 1..21: mol_type = other RNA
  modified_base 1: mod_base = OTHER; note = 2'-O-methyladenosine-3'- phosphorothioate
  modified_base 2: mod_base = OTHER; note = 2'-O-methyluridine-3'-phosphorothioate
  modified_base 3: mod_base = OTHER; note = 2'-O-methylcytidine-3'-phosphate
  modified_base 4: mod_base = OTHER; note = 2'-O-methyladenosine-3'-phosphate
  modified_base 5: mod_base = OTHER; note = 2'-O-methyluridine-3'-phosphate
  modified_base 6: mod_base = OTHER; note = 2'-O-methyluridine-3'-phosphate
  modified_base 7: mod_base = OTHER; note = 2'-fluorouridine-3'-phosphate
  modified_base 8: mod_base = OTHER; note = 2'-O-methylcytidine-3'-phosphate
  modified_base 9: mod_base = OTHER; note = 2'-fluoroadenosine-3'-phosphate
  modified_base 10: mod_base = OTHER; note = 2'-fluorocytidine-3'-phosphate
  modified_base 11: mod_base = OTHER; note = 2'-fluorouridine-3'-phosphate
  modified_base 12: mod_base = OTHER; note = 2'-O-methylguanosine-3'-phosphate
  modified_base 13: mod_base = OTHER; note = 2'-O-methyluridine-3'-phosphate
  modified_base 14: mod_base = OTHER; note = 2'-O-methylcytidine-3'-phosphate
  modified_base 15: mod_base = OTHER; note = 2'-O-methyluridine-3'-phosphate
  modified_base 16: mod_base = OTHER; note = 2'-O-methyladenosine-3'-phosphate
  modified_base 17: mod_base = OTHER; note = 2'-O-methylguanosine-3'-phosphate
  modified_base 18: mod_base = OTHER; note = 2'-O-methylguanosine-3'-phosphate
  modified_base 19: mod_base = OTHER; note = 2'-O-methylcytidine-3'-phosphate
  modified_base 20: mod_base = OTHER; note = 2'-O-methyluridine-3'-phosphate
  modified_base 21: mod_base = OTHER; note 2'-O-methyladenosine-3'-phosphate-N-[tris(GalNAc-alkyl)-ami dodecanoyl)]-4-hydroxyprolinol (Hyp-(GalNAc-alkyl)3)
atcatttcactgtctaggcta

SEQ ID NO: 3722 - RNA, 21 nt, synthetic construct
  source 1..21: mol_type = other RNA
  modified_base 1: mod_base = OTHER; note = 2'-O-methyluridine-3'-phosphorothioate
  modified_base 2: mod_base = OTHER; note = 2'-O-methylcytidine-3'- phosphorothioate
  modified_base 3: mod_base = OTHER; note = 2'-O-methyladenosine-3'-phosphate
  modified_base 4: mod_base = OTHER; note = 2'-O-methylcytidine-3'-phosphate
  modified_base 5: mod_base = OTHER; note = 2'-O-methyluridine-3'-phosphate
  modified_base 6: mod_base = OTHER; note = 2'-O-methylguanosine-3'-phosphate
  modified_base 7: mod_base = OTHER; note = 2'-fluorouridine-3'-phosphate
  modified_base 8: mod_base = OTHER; note = 2'-O-methylcytidine-3'-phosphate
  modified_base 9: mod_base = OTHER; note = 2'-fluorouridine-3'-phosphate
  modified_base 10: mod_base = OTHER; note = 2'-fluoroadenosine-3'-phosphate
  modified_base 11: mod_base = OTHER; note = 2'-fluoroguanosine-3'-phosphate
  modified_base 12: mod_base = OTHER; note = 2'-O-methylguanosine-3'-phosphate
  modified_base 13: mod_base = OTHER; note = 2'-O-methylcytidine-3'-phosphate
  modified_base 14: mod_base = OTHER; note = 2'-O-methyluridine-3'-phosphate
  modified_base 15: mod_base = OTHER; note = 2'-O-methyladenosine-3'-phosphate
  modified_base 16: mod_base = OTHER; note = 2'-O-methylcytidine-3'-phosphate
  modified_base 17: mod_base = OTHER; note = 2'-O-methyladenosine-3'-phosphate
  modified_base 18: mod_base = OTHER; note = 2'-O-methyladenosine-3'-phosphate
  modified_base 19: mod_base = OTHER; note = 2'-O-methylcytidine-3'-phosphate
  modified_base 20: mod_base = OTHER; note = 2'-O-methyladenosine-3'-phosphate
  modified_base 21: mod_base = OTHER; note 2'-O-methyladenosine-3'-phosphate-N-[tris(GalNAc-alkyl)-ami dodecanoyl)]-4-hydroxyprolinol (Hyp-(GalNAc-alkyl)3)
tcactgtctaggctacaacaa

SEQ ID NO: 3723 - RNA, 21 nt, synthetic construct
  source 1..21: mol_type = other RNA
  modified_base 1: mod_base = OTHER; note = 2'-O-methylcytidine-3'- phosphorothioate
  modified_base 2: mod_base = OTHER; note = 2'-O-methyladenosine-3'- phosphorothioate
  modified_base 3: mod_base = OTHER; note = 2'-O-methyladenosine-3'-phosphate
  modified_base 4: mod_base = OTHER; note = 2'-O-methylcytidine-3'-phosphate
  modified_base 5: mod_base = OTHER; note = 2'-O-methyluridine-3'-phosphate
  modified_base 6: mod_base = OTHER; note = 2'-O-methyladenosine-3'-phosphate
  modified_base 7: mod_base = OTHER; note = 2'-fluorouridine-3'-phosphate
  modified_base 8: mod_base = OTHER; note = 2'-O-methylcytidine-3'-phosphate
  modified_base 9: mod_base = OTHER; note = 2'-fluorocytidine-3'-phosphate
  modified_base 10: mod_base = OTHER; note = 2'-fluoroadenosine-3'-phosphate
  modified_base 11: mod_base = OTHER; note = 2'-fluoroadenosine-3'-phosphate
  modified_base 12: mod_base = OTHER; note = 2'-O-methylguanosine-3'-phosphate
  modified_base 13: mod_base = OTHER; note = 2'-O-methyluridine-3'-phosphate
  modified_base 14: mod_base = OTHER; note = 2'-O-methylguanosine-3'-phosphate
  modified_base 15: mod_base = OTHER; note = 2'-O-methyluridine-3'-phosphate
  modified_base 16: mod_base = OTHER; note = 2'-O-methyluridine-3'-phosphate
  modified_base 17: mod_base = OTHER; note = 2'-O-methyladenosine-3'-phosphate
  modified_base 18: mod_base = OTHER; note = 2'-O-methyluridine-3'-phosphate
  modified_base 19: mod_base = OTHER; note = 2'-O-methyladenosine-3'-phosphate
  modified_base 20: mod_base = OTHER; note = 2'-O-methylcytidine-3'-phosphate
  modified_base 21: mod_base = OTHER; note 2'-O-methyladenosine-3'-phosphate-N-[tris(GalNAc-alkyl)-ami dodecanoyl)]-4-hydroxyprolinol (Hyp-(GalNAc-alkyl)3)
caactatccaagtgttataca

SEQ ID NO: 3724 - RNA, 21 nt, synthetic construct
  source 1..21: mol_type = other RNA
  modified_base 1: mod_base = OTHER; note = 2'-O-methyluridine-3'-phosphorothioate
  modified_base 2: mod_base = OTHER; note = 2'-O-methyluridine-3'-phosphorothioate
  modified_base 3: mod_base = OTHER; note = 2'-O-methylguanosine-3'-phosphate
  modified_base 4: mod_base = OTHER; note = 2'-O-methylguanosine-3'-phosphate
  modified_base 5: mod_base = OTHER; note = 2'-O-methyluridine-3'-phosphate
  modified_base 6: mod_base = OTHER; note = 2'-O-methyluridine-3'-phosphate
  modified_base 7: mod_base = OTHER; note = 2'-fluorocytidine-3'-phosphate
  modified_base 8: mod_base = OTHER; note = 2'-O-methylcytidine-3'-phosphate
  modified_base 9: mod_base = OTHER; note = 2'-fluoroadenosine-3'-phosphate
  modified_base 10: mod_base = OTHER; note = 2'-fluoroadenosine-3'-phosphate
  modified_base 11: mod_base = OTHER; note = 2'-fluoroguanosine-3'-phosphate
  modified_base 12: mod_base = OTHER; note = 2'-O-methyluridine-3'-phosphate
  modified_base 13: mod_base = OTHER; note = 2'-O-methylcytidine-3'-phosphate
  modified_base 14: mod_base = OTHER; note = 2'-O-methylcytidine-3'-phosphate
  modified_base 15: mod_base = OTHER; note = 2'-O-methyladenosine-3'-phosphate
  modified_base 16: mod_base = OTHER; note = 2'-O-methyladenosine-3'-phosphate
  modified_base 17: mod_base = OTHER; note = 2'-O-methyluridine-3'-phosphate
  modified_base 18: mod_base = OTHER; note = 2'-O-methyladenosine-3'-phosphate
  modified_base 19: mod_base = OTHER; note = 2'-O-methyluridine-3'-phosphate
  modified_base 20: mod_base = OTHER; note = 2'-O-methylguanosine-3'-phosphate
  modified_base 21: mod_base = OTHER; note 2'-O-methyladenosine-3'-phosphate-N-[tris(GalNAc-alkyl)-ami dodecanoyl)]-4-hydroxyprolinol (Hyp-(GalNAc-alkyl)3)
ttggttccaagtccaatatga

SEQ ID NO: 3725 - RNA, 21 nt, synthetic construct
  source 1..21: mol_type = other RNA
  modified_base 1: mod_base = OTHER; note = 2'-O-methyluridine-3'-phosphorothioate
  modified_base 2: mod_base = OTHER; note = 2'-O-methylguanosine-3'- phosphorothioate
  modified_base 3: mod_base = OTHER; note = 2'-O-methylcytidine-3'-phosphate
  modified_base 4: mod_base = OTHER; note = 2'-O-methyluridine-3'-phosphate
  modified_base 5: mod_base = OTHER; note = 2'-O-methyluridine-3'-phosphate
  modified_base 6: mod_base = OTHER; note = 2'-O-methyladenosine-3'-phosphate
  modified_base 7: mod_base = OTHER; note = 2'-fluorouridine-3'-phosphate
  modified_base 8: mod_base = OTHER; note = 2'-O-methylguanosine-3'-phosphate
  modified_base 9: mod_base = OTHER; note = 2'-fluoroadenosine-3'-phosphate
  modified_base 10: mod_base = OTHER; note = 2'-fluoroguanosine-3'-phosphate
  modified_base 11: mod_base = OTHER; note = 2'-fluoroguanosine-3'-phosphate
  modified_base 12: mod_base = OTHER; note = 2'-O-methyluridine-3'-phosphate
  modified_base 13: mod_base = OTHER; note = 2'-O-methylguanosine-3'-phosphate
  modified_base 14: mod_base = OTHER; note = 2'-O-methyladenosine-3'-phosphate
  modified_base 15: mod_base = OTHER; note = 2'-O-methyluridine-3'-phosphate
  modified_base 16: mod_base = OTHER; note = 2'-O-methylcytidine-3'-phosphate
  modified_base 17: mod_base = OTHER; note = 2'-O-methyladenosine-3'-phosphate
  modified_base 18: mod_base = OTHER; note = 2'-O-methyladenosine-3'-phosphate
  modified_base 19: mod_base = OTHER; note = 2'-O-methyladenosine-3'-phosphate
  modified_base 20: mod_base = OTHER; note = 2'-O-methylcytidine-3'-phosphate
  modified_base 21: mod_base = OTHER; note 2'-O-methyluridine-3'-phosphate-N-[tris(GalNAc-alkyl)-amido decanoyl)]-4-hydroxyprolinol (Hyp-(GalNAc-alkyl)3)
tgcttatgaggtgatcaaact

SEQ ID NO: 3726 - RNA, 21 nt, synthetic construct
  source 1..21: mol_type = other RNA
  modified_base 1: mod_base = OTHER; note = 2'-O-methyluridine-3'-phosphorothioate
  modified_base 2: mod_base = OTHER; note = 2'-O-methylcytidine-3'- phosphorothioate
  modified_base 3: mod_base = OTHER; note = 2'-O-methyluridine-3'-phosphate
  modified_base 4: mod_base = OTHER; note = 2'-O-methylcytidine-3'-phosphate
  modified_base 5: mod_base = OTHER; note = 2'-O-methyladenosine-3'-phosphate
  modified_base 6: mod_base = OTHER; note = 2'-O-methylguanosine-3'-phosphate
  modified_base 7: mod_base = OTHER; note = 2'-fluoroadenosine-3'-phosphate
  modified_base 8: mod_base = OTHER; note = 2'-O-methylcytidine-3'-phosphate
  modified_base 9: mod_base = OTHER; note = 2'-fluorocytidine-3'-phosphate
  modified_base 10: mod_base = OTHER; note = 2'-fluorouridine-3'-phosphate
  modified_base 11: mod_base = OTHER; note = 2'-fluorouridine-3'-phosphate
  modified_base 12: mod_base = OTHER; note = 2'-O-methylguanosine-3'-phosphate
  modified_base 13: mod_base = OTHER; note = 2'-O-methyluridine-3'-phosphate
  modified_base 14: mod_base = OTHER; note = 2'-O-methylguanosine-3'-phosphate
  modified_base 15: mod_base = OTHER; note = 2'-O-methyladenosine-3'-phosphate
  modified_base 16: mod_base = OTHER; note = 2'-O-methyladenosine-3'-phosphate
  modified_base 17: mod_base = OTHER; note = 2'-O-methylguanosine-3'-phosphate
  modified_base 18: mod_base = OTHER; note = 2'-O-methylguanosine-3'-phosphate
  modified_base 19: mod_base = OTHER; note = 2'-O-methyluridine-3'-phosphate
  modified_base 20: mod_base = OTHER; note = 2'-O-methylguanosine-3'-phosphate
  modified_base 21: mod_base = OTHER; note 2'-O-methyladenosine-3'-phosphate-N-[tris(GalNAc-alkyl)-ami dodecanoyl)]-4-hydroxyprolinol (Hyp-(GalNAc-alkyl)3)
tctcagaccttgtgaaggtga

SEQ ID NO: 3727 - RNA, 21 nt, synthetic construct
  source 1..21: mol_type = other RNA
  modified_base 1: mod_base = OTHER; note = 2'-O-methyluridine-3'-phosphorothioate
  modified_base 2: mod_base = OTHER; note = 2'-O-methyladenosine-3'- phosphorothioate
  modified_base 3: mod_base = OTHER; note = 2'-O-methyladenosine-3'-phosphate
  modified_base 4: mod_base = OTHER; note = 2'-O-methyladenosine-3'-phosphate
  modified_base 5: mod_base = OTHER; note = 2'-O-methyladenosine-3'-phosphate
  modified_base 6: mod_base = OTHER; note = 2'-O-methyluridine-3'-phosphate
  modified_base 7: mod_base = OTHER; note = 2'-fluorocytidine-3'-phosphate
  modified_base 8: mod_base = OTHER; note = 2'-O-methylcytidine-3'-phosphate
  modified_base 9: mod_base = OTHER; note = 2'-fluoroadenosine-3'-phosphate
  modified_base 10: mod_base = OTHER; note = 2'-fluorocytidine-3'-phosphate
  modified_base 11: mod_base = OTHER; note = 2'-fluoroadenosine-3'-phosphate
  modified_base 12: mod_base = OTHER; note = 2'-O-methylguanosine-3'-phosphate
  modified_base 13: mod_base = OTHER; note = 2'-O-methylcytidine-3'-phosphate
  modified_base 14: mod_base = OTHER; note = 2'-O-methyluridine-3'-phosphate
  modified_base 15: mod_base = OTHER; note = 2'-O-methyladenosine-3'-phosphate
  modified_base 16: mod_base = OTHER; note = 2'-O-methyluridine-3'-phosphate
  modified_base 17: mod_base = OTHER; note = 2'-O-methyladenosine-3'-phosphate
  modified_base 18: mod_base = OTHER; note = 2'-O-methyluridine-3'-phosphate
  modified_base 19: mod_base = OTHER; note = 2'-O-methylcytidine-3'-phosphate
  modified_base 20: mod_base = OTHER; note = 2'-O-methylcytidine-3'-phosphate
  modified_base 21: mod_base = OTHER; note 2'-O-methyluridine-3'-phosphate-N-[tris(GalNAc-alkyl)-amido decanoyl)]-4-hydroxyprolinol (Hyp-(GalNAc-alkyl)3)
taaaatccacagctatatcct

SEQ ID NO: 3728 - RNA, 21 nt, synthetic construct
  source 1..21: mol_type = other RNA
  modified_base 1: mod_base = OTHER; note = 2'-O-methylcytidine-3'- phosphorothioate
  modified_base 2: mod_base = OTHER; note = 2'-O-methylcytidine-3'- phosphorothioate
  modified_base 3: mod_base = OTHER; note = 2'-O-methyluridine-3'-phosphate
  modified_base 4: mod_base = OTHER; note = 2'-O-methyluridine-3'-phosphate
  modified_base 5: mod_base = OTHER; note = 2'-O-methylcytidine-3'-phosphate
  modified_base 6: mod_base = OTHER; note = 2'-O-methyladenosine-3'-phosphate
  modified_base 7: mod_base = OTHER; note = 2'-fluorocytidine-3'-phosphate
  modified_base 8: mod_base = OTHER; note = 2'-O-methyluridine-3'-phosphate
  modified_base 9: mod_base = OTHER; note = 2'-fluoroguanosine-3'-phosphate
  modified_base 10: mod_base = OTHER; note = 2'-fluoroadenosine-3'-phosphate
  modified_base 11: mod_base = OTHER; note = 2'-fluoroadenosine-3'-phosphate
  modified_base 12: mod_base = OTHER; note = 2'-O-methylcytidine-3'-phosphate
  modified_base 13: mod_base = OTHER; note = 2'-O-methyladenosine-3'-phosphate
  modified_base 14: mod_base = OTHER; note = 2'-O-methyluridine-3'-phosphate
  modified_base 15: mod_base = OTHER; note = 2'-O-methylguanosine-3'-phosphate
  modified_base 16: mod_base = OTHER; note = 2'-O-methylcytidine-3'-phosphate
  modified_base 17: mod_base = OTHER; note = 2'-O-methylcytidine-3'-phosphate
  modified_base 18: mod_base = OTHER; note = 2'-O-methyluridine-3'-phosphate
  modified_base 19: mod_base = OTHER; note = 2'-O-methyladenosine-3'-phosphate
  modified_base 20: mod_base = OTHER; note = 2'-O-methylguanosine-3'-phosphate
  modified_base 21: mod_base = OTHER; note 2'-O-methyluridine-3'-phosphate-N-[tris(GalNAc-alkyl)-amido decanoyl)]-4-hydroxyprolinol (Hyp-(GalNAc-alkyl)3)
ccttcactgaacatgcctagt

SEQ ID NO: 3729 - RNA, 21 nt, synthetic construct
  source 1..21: mol_type = other RNA
  modified_base 1: mod_base = OTHER; note = 2'-O-methylguanosine-3'- phosphorothioate
  modified_base 2: mod_base = OTHER; note = 2'-O-methylguanosine-3'- phosphorothioate
  modified_base 3: mod_base = OTHER; note = 2'-O-methylguanosine-3'-phosphate
  modified_base 4: mod_base = OTHER; note = 2'-O-methyladenosine-3'-phosphate
  modified_base 5: mod_base = OTHER; note = 2'-O-methyluridine-3'-phosphate
  modified_base 6: mod_base = OTHER; note = 2'-O-methylcytidine-3'-phosphate
  modified_base 7: mod_base = OTHER; note = 2'-fluorocytidine-3'-phosphate
  modified_base 8: mod_base = OTHER; note = 2'-O-methyladenosine-3'-phosphate
  modified_base 9: mod_base = OTHER; note = 2'-fluoroguanosine-3'-phosphate
  modified_base 10: mod_base = OTHER; note = 2'-fluorouridine-3'-phosphate
  modified_base 11: mod_base = OTHER; note = 2'-fluoroguanosine-3'-phosphate
  modified_base 12: mod_base = OTHER; note = 2'-O-methyluridine-3'-phosphate
  modified_base 13: mod_base = OTHER; note = 2'-O-methyladenosine-3'-phosphate
  modified_base 14: mod_base = OTHER; note = 2'-O-methyluridine-3'-phosphate
  modified_base 15: mod_base = OTHER; note = 2'-O-methyladenosine-3'-phosphate
  modified_base 16: mod_base = OTHER; note = 2'-O-methyladenosine-3'-phosphate
  modified_base 17: mod_base = OTHER; note = 2'-O-methyladenosine-3'-phosphate
  modified_base 18: mod_base = OTHER; note = 2'-O-methyluridine-3'-phosphate
  modified_base 19: mod_base = OTHER; note = 2'-O-methylcytidine-3'-phosphate
  modified_base 20: mod_base = OTHER; note = 2'-O-methylcytidine-3'-phosphate
  modified_base 21: mod_base = OTHER; note 2'-O-methyladenosine-3'-phosphate-N-[tris(GalNAc-alkyl)-ami dodecanoyl)]-4-hydroxyprolinol (Hyp-(GalNAc-alkyl)3)
gggatccagtgtataaatcca

SEQ ID NO: 3730 - RNA, 21 nt, synthetic construct
  source 1..21: mol_type = other RNA
  modified_base 1: mod_base = OTHER; note = 2'-O-methylcytidine-3'- phosphorothioate
  modified_base 2: mod_base = OTHER; note = 2'-O-methyladenosine-3'- phosphorothioate
  modified_base 3: mod_base = OTHER; note = 2'-O-methyladenosine-3'-phosphate
  modified_base 4: mod_base = OTHER; note = 2'-O-methyluridine-3'-phosphate
  modified_base 5: mod_base = OTHER; note = 2'-O-methyladenosine-3'-phosphate
  modified_base 6: mod_base = OTHER; note = 2'-O-methyladenosine-3'-phosphate
  modified_base 7: mod_base = OTHER; note = 2'-fluoroadenosine-3'-phosphate
  modified_base 8: mod_base = OTHER; note = 2'-O-methylcytidine-3'-phosphate
  modified_base 9: mod_base = OTHER; note = 2'-fluorocytidine-3'-phosphate
  modified_base 10: mod_base = OTHER; note = 2'-fluorouridine-3'-phosphate
  modified_base 11: mod_base = OTHER; note = 2'-fluorouridine-3'-phosphate
  modified_base 12: mod_base = OTHER; note = 2'-O-methylguanosine-3'-phosphate
  modified_base 13: mod_base = OTHER; note = 2'-O-methyladenosine-3'-phosphate
  modified_base 14: mod_base = OTHER; note = 2'-O-methyladenosine-3'-phosphate
  modified_base 15: mod_base = OTHER; note = 2'-O-methylcytidine-3'-phosphate
  modified_base 16: mod_base = OTHER; note = 2'-O-methyladenosine-3'-phosphate
  modified_base 17: mod_base = OTHER; note = 2'-O-methylguanosine-3'-phosphate
  modified_base 18: mod_base = OTHER; note = 2'-O-methyluridine-3'-phosphate
  modified_base 19: mod_base = OTHER; note = 2'-O-methylguanosine-3'-phosphate
  modified_base 20: mod_base = OTHER; note = 2'-O-methyladenosine-3'-phosphate
  modified_base 21: mod_base = OTHER; note 2'-O-methyladenosine-3'-phosphate-N-[tris(GalNAc-alkyl)-ami dodecanoyl)]-4-hydroxyprolinol (Hyp-(GalNAc-alkyl)3)
caataaaccttgaacagtgaa

SEQ ID NO: 3731 - RNA, 21 nt, synthetic construct
  source 1..21: mol_type = other RNA
  modified_base 1: mod_base = OTHER; note = 2'-O-methylguanosine-3'- phosphorothioate
  modified_base 2: mod_base = OTHER; note = 2'-O-methylguanosine-3'- phosphorothioate
  modified_base 3: mod_base = OTHER; note = 2'-O-methylcytidine-3'-phosphate
  modified_base 4: mod_base = OTHER; note = 2'-O-methylcytidine-3'-phosphate
  modified_base 5: mod_base = OTHER; note = 2'-O-methyluridine-3'-phosphate
  modified_base 6: mod_base = OTHER; note = 2'-O-methylguanosine-3'-phosphate
  modified_base 7: mod_base = OTHER; note = 2'-fluorouridine-3'-phosphate
  modified_base 8: mod_base = OTHER; note = 2'-O-methylguanosine-3'-phosphate
  modified_base 9: mod_base = OTHER; note = 2'-fluorocytidine-3'-phosphate
  modified_base 10: mod_base = OTHER; note = 2'-fluorocytidine-3'-phosphate
  modified_base 11: mod_base = OTHER; note = 2'-fluoroadenosine-3'-phosphate
  modified_base 12: mod_base = OTHER; note = 2'-O-methyluridine-3'-phosphate
  modified_base 13: mod_base = OTHER; note = 2'-O-methylcytidine-3'-phosphate
  modified_base 14: mod_base = OTHER; note = 2'-O-methyladenosine-3'-phosphate
  modified_base 15: mod_base = OTHER; note = 2'-O-methylguanosine-3'-phosphate
  modified_base 16: mod_base = OTHER; note = 2'-O-methyluridine-3'-phosphate
  modified_base 17: mod_base = OTHER; note = 2'-O-methyladenosine-3'-phosphate
  modified_base 18: mod_base = OTHER; note = 2'-O-methyluridine-3'-phosphate
  modified_base 19: mod_base = OTHER; note = 2'-O-methylcytidine-3'-phosphate
  modified_base 20: mod_base = OTHER; note = 2'-O-methyluridine-3'-phosphate
  modified_base 21: mod_base = OTHER; note 2'-O-methyluridine-3'-phosphate-N-[tris(GalNAc-alkyl)-amido decanoyl)]-4-hydroxyprolinol (Hyp-(GalNAc-alkyl)3)
ggcctgtgccatcagtatctt

SEQ ID NO: 3732 - RNA, 21 nt, synthetic construct
  source 1..21: mol_type = other RNA
  modified_base 1: mod_base = OTHER; note = 2'-O-methyluridine-3'-phosphorothioate
  modified_base 2: mod_base = OTHER; note = 2'-O-methyluridine-3'-phosphorothioate
  modified_base 3: mod_base = OTHER; note = 2'-O-methylguanosine-3'-phosphate
  modified_base 4: mod_base = OTHER; note = 2'-O-methyluridine-3'-phosphate
  modified_base 5: mod_base = OTHER; note = 2'-O-methyluridine-3'-phosphate
  modified_base 6: mod_base = OTHER; note = 2'-O-methylguanosine-3'-phosphate
  modified_base 7: mod_base = OTHER; note = 2'-fluoroadenosine-3'-phosphate
  modified_base 8: mod_base = OTHER; note = 2'-O-methyluridine-3'-phosphate
  modified_base 9: mod_base = OTHER; note = 2'-fluoroguanosine-3'-phosphate
  modified_base 10: mod_base = OTHER; note = 2'-fluorouridine-3'-phosphate
  modified_base 11: mod_base = OTHER; note = 2'-fluorocytidine-3'-phosphate
  modified_base 12: mod_base = OTHER; note = 2'-O-methyladenosine-3'-phosphate
  modified_base 13: mod_base = OTHER; note = 2'-O-methyluridine-3'-phosphate
  modified_base 14: mod_base = OTHER; note = 2'-O-methylcytidine-3'-phosphate
  modified_base 15: mod_base = OTHER; note = 2'-O-methylguanosine-3'-phosphate
  modified_base 16: mod_base = OTHER; note = 2'-O-methyladenosine-3'-phosphate
  modified_base 17: mod_base = OTHER; note = 2'-O-methyladenosine-3'-phosphate
  modified_base 18: mod_base = OTHER; note = 2'-O-methylguanosine-3'-phosphate
  modified_base 19: mod_base = OTHER; note = 2'-O-methyladenosine-3'-phosphate
  modified_base 20: mod_base = OTHER; note = 2'-O-methylcytidine-3'-phosphate
  modified_base 21: mod_base = OTHER; note 2'-O-methyladenosine-3'-phosphate-N-[tris(GalNAc-alkyl)-ami dodecanoyl)]-4-hydroxyprolinol (Hyp-(GalNAc-alkyl)3)
ttgttgatgtcatcgaagaca

SEQ ID NO: 3733 - RNA, 21 nt, synthetic construct
  source 1..21: mol_type = other RNA
  modified_base 1: mod_base = OTHER; note = 2'-O-methyladenosine-3'- phosphorothioate
  modified_base 2: mod_base = OTHER; note = 2'-O-methylguanosine-3'- phosphorothioate
  modified_base 3: mod_base = OTHER; note = 2'-O-methyladenosine-3'-phosphate
  modified_base 4: mod_base = OTHER; note = 2'-O-methyluridine-3'-phosphate
  modified_base 5: mod_base = OTHER; note = 2'-O-methyluridine-3'-phosphate
  modified_base 6: mod_base = OTHER; note = 2'-O-methyluridine-3'-phosphate
  modified_base 7: mod_base = OTHER; note = 2'-fluoroguanosine-3'-phosphate
  modified_base 8: mod_base = OTHER; note = 2'-O-methylguanosine-3'-phosphate
  modified_base 9: mod_base = OTHER; note = 2'-fluorocytidine-3'-phosphate
  modified_base 10: mod_base = OTHER; note = 2'-fluoroadenosine-3'-phosphate
  modified_base 11: mod_base = OTHER; note = 2'-fluoroguanosine-3'-phosphate
  modified_base 12: mod_base = OTHER; note = 2'-O-methyladenosine-3'-phosphate
  modified_base 13: mod_base = OTHER; note = 2'-O-methylguanosine-3'-phosphate
  modified_base 14: mod_base = OTHER; note = 2'-O-methyladenosine-3'-phosphate
  modified_base 15: mod_base = OTHER; note = 2'-O-methylguanosine-3'-phosphate
  modified_base 16: mod_base = OTHER; note = 2'-O-methyluridine-3'-phosphate
  modified_base 17: mod_base = OTHER; note = 2'-O-methyladenosine-3'-phosphate
  modified_base 18: mod_base = OTHER; note = 2'-O-methyluridine-3'-phosphate
  modified_base 19: mod_base = OTHER; note = 2'-O-methyladenosine-3'-phosphate
  modified_base 20: mod_base = OTHER; note = 2'-O-methyladenosine-3'-phosphate
  modified_base 21: mod_base = OTHER; note 2'-O-methyluridine-3'-phosphate-N-[tris(GalNAc-alkyl)-amido decanoyl)]-4-hydroxyprolinol (Hyp-(GalNAc-alkyl)3)
agatttggcagagagtataat

SEQ ID NO: 3734 - RNA, 21 nt, synthetic construct
  source 1..21: mol_type = other RNA
  modified_base 1: mod_base = OTHER; note = 2'-O-methyluridine-3'-phosphorothioate
  modified_base 2: mod_base = OTHER; note = 2'-O-methyluridine-3'-phosphorothioate
  modified_base 3: mod_base = OTHER; note = 2'-O-methyluridine-3'-phosphate
  modified_base 4: mod_base = OTHER; note = 2'-O-methylcytidine-3'-phosphate
  modified_base 5: mod_base = OTHER; note = 2'-O-methylcytidine-3'-phosphate
  modified_base 6: mod_base = OTHER; note = 2'-O-methyladenosine-3'-phosphate
  modified_base 7: mod_base = OTHER; note = 2'-fluorocytidine-3'-phosphate
  modified_base 8: mod_base = OTHER; note = 2'-O-methylcytidine-3'-phosphate
  modified_base 9: mod_base = OTHER; note = 2'-fluoroadenosine-3'-phosphate
  modified_base 10: mod_base = OTHER; note = 2'-fluorouridine-3'-phosphate
  modified_base 11: mod_base = OTHER; note = 2'-fluoroguanosine-3'-phosphate
  modified_base 12: mod_base = OTHER; note = 2'-O-methyladenosine-3'-phosphate
  modified_base 13: mod_base = OTHER; note = 2'-O-methyluridine-3'-phosphate
  modified_base 14: mod_base = OTHER; note = 2'-O-methyluridine-3'-phosphate
  modified_base 15: mod_base = OTHER; note = 2'-O-methyladenosine-3'-phosphate
  modified_base 16: mod_base = OTHER; note = 2'-O-methyladenosine-3'-phosphate
  modified_base 17: mod_base = OTHER; note = 2'-O-methylguanosine-3'-phosphate
  modified_base 18: mod_base = OTHER; note = 2'-O-methylguanosine-3'-phosphate
  modified_base 19: mod_base = OTHER; note = 2'-O-methylguanosine-3'-phosphate
  modified_base 20: mod_base = OTHER; note = 2'-O-methyluridine-3'-phosphate
  modified_base 21: mod_base = OTHER; note 2'-O-methyladenosine-3'-phosphate-N-[tris(GalNAc-alkyl)-ami dodecanoyl)]-4-hydroxyprolinol (Hyp-(GalNAc-alkyl)3)
tttccaccatgattaagggta

SEQ ID NO: 3735 - RNA, 21 nt, synthetic construct
  source 1..21: mol_type = other RNA
  modified_base 1: mod_base = OTHER; note = 2'-O-methylcytidine-3'- phosphorothioate
  modified_base 2: mod_base = OTHER; note = 2'-O-methyluridine-3'-phosphorothioate
  modified_base 3: mod_base = OTHER; note = 2'-O-methyladenosine-3'-phosphate
  modified_base 4: mod_base = OTHER; note = 2'-O-methylguanosine-3'-phosphate
  modified_base 5: mod_base = OTHER; note = 2'-O-methylguanosine-3'-phosphate
  modified_base 6: mod_base = OTHER; note = 2'-O-methylcytidine-3'-phosphate
  modified_base 7: mod_base = OTHER; note = 2'-fluorouridine-3'-phosphate
  modified_base 8: mod_base = OTHER; note = 2'-O-methyladenosine-3'-phosphate
  modified_base 9: mod_base = OTHER; note = 2'-fluorocytidine-3'-phosphate
  modified_base 10: mod_base = OTHER; note = 2'-fluoroadenosine-3'-phosphate
  modified_base 11: mod_base = OTHER; note = 2'-fluoroadenosine-3'-phosphate
  modified_base 12: mod_base = OTHER; note = 2'-O-methylcytidine-3'-phosphate
  modified_base 13: mod_base = OTHER; note = 2'-O-methyladenosine-3'-phosphate
  modified_base 14: mod_base = OTHER; note = 2'-O-methylguanosine-3'-phosphate
  modified_base 15: mod_base = OTHER; note = 2'-O-methylguanosine-3'-phosphate
  modified_base 16: mod_base = OTHER; note = 2'-O-methyladenosine-3'-phosphate
  modified_base 17: mod_base = OTHER; note = 2'-O-methyluridine-3'-phosphate
  modified_base 18: mod_base = OTHER; note = 2'-O-methyluridine-3'-phosphate
  modified_base 19: mod_base = OTHER; note = 2'-O-methylcytidine-3'-phosphate
  modified_base 20: mod_base = OTHER; note = 2'-O-methyluridine-3'-phosphate
  modified_base 21: mod_base = OTHER; note 2'-O-methyladenosine-3'-phosphate-N-[tris(GalNAc-alkyl)-ami dodecanoyl)]-4-hydroxyprolinol (Hyp-(GalNAc-alkyl)3)
ctaggctacaacaggattcta

SEQ ID NO: 3736 - RNA, 21 nt, synthetic construct
  source 1..21: mol_type = other RNA
  modified_base 1: mod_base = OTHER; note = 2'-O-methyluridine-3'-phosphorothioate
  modified_base 2: mod_base = OTHER; note = 2'-O-methylguanosine-3'- phosphorothioate
  modified_base 3: mod_base = OTHER; note = 2'-O-methylguanosine-3'-phosphate
  modified_base 4: mod_base = OTHER; note = 2'-O-methyladenosine-3'-phosphate
  modified_base 5: mod_base = OTHER; note = 2'-O-methylguanosine-3'-phosphate
  modified_base 6: mod_base = OTHER; note = 2'-O-methylguanosine-3'-phosphate
  modified_base 7: mod_base = OTHER; note = 2'-fluorouridine-3'-phosphate
  modified_base 8: mod_base = OTHER; note = 2'-O-methyluridine-3'-phosphate
  modified_base 9: mod_base = OTHER; note = 2'-fluoroguanosine-3'-phosphate
  modified_base 10: mod_base = OTHER; note = 2'-fluorouridine-3'-phosphate
  modified_base 11: mod_base = OTHER; note = 2'-fluoroguanosine-3'-phosphate
  modified_base 12: mod_base = OTHER; note = 2'-O-methylcytidine-3'-phosphate
  modified_base 13: mod_base = OTHER; note = 2'-O-methyladenosine-3'-phosphate
  modified_base 14: mod_base = OTHER; note = 2'-O-methyluridine-3'-phosphate
  modified_base 15: mod_base = OTHER; note = 2'-O-methylguanosine-3'-phosphate
  modified_base 16: mod_base = OTHER; note = 2'-O-methyluridine-3'-phosphate
  modified_base 17: mod_base = OTHER; note = 2'-O-methyluridine-3'-phosphate
  modified_base 18: mod_base = OTHER; note = 2'-O-methylguanosine-3'-phosphate
  modified_base 19: mod_base = OTHER; note = 2'-O-methyluridine-3'-phosphate
  modified_base 20: mod_base = OTHER; note = 2'-O-methylcytidine-3'-phosphate
  modified_base 21: mod_base = OTHER; note 2'-O-methyladenosine-3'-phosphate-N-[tris(GalNAc-alkyl)-ami dodecanoyl)]-4-hydroxyprolinol (Hyp-(GalNAc-alkyl)3)
tggaggttgtgcatgttgtca

SEQ ID NO: 3737 - RNA, 21 nt, synthetic construct
  source 1..21: mol_type = other RNA
  modified_base 1: mod_base = OTHER; note = 2'-O-methylguanosine-3'- phosphorothioate
  modified_base 2: mod_base = OTHER; note = 2'-O-methylcytidine-3'- phosphorothioate
  modified_base 3: mod_base = OTHER; note = 2'-O-methyluridine-3'-phosphate
  modified_base 4: mod_base = OTHER; note = 2'-O-methylcytidine-3'-phosphate
  modified_base 5: mod_base = OTHER; note = 2'-O-methylcytidine-3'-phosphate
  modified_base 6: mod_base = OTHER; note = 2'-O-methyluridine-3'-phosphate
  modified_base 7: mod_base = OTHER; note = 2'-fluorouridine-3'-phosphate
  modified_base 8: mod_base = OTHER; note = 2'-O-methylcytidine-3'-phosphate
  modified_base 9: mod_base = OTHER; note = 2'-fluoroadenosine-3'-phosphate
  modified_base 10: mod_base = OTHER; note = 2'-fluorocytidine-3'-phosphate
  modified_base 11: mod_base = OTHER; note = 2'-fluorouridine-3'-phosphate
  modified_base 12: mod_base = OTHER; note = 2'-O-methylguanosine-3'-phosphate
  modified_base 13: mod_base = OTHER; note = 2'-O-methyladenosine-3'-phosphate
  modified_base 14: mod_base = OTHER; note = 2'-O-methyladenosine-3'-phosphate
  modified_base 15: mod_base = OTHER; note = 2'-O-methylcytidine-3'-phosphate
  modified_base 16: mod_base = OTHER; note = 2'-O-methyladenosine-3'-phosphate
  modified_base 17: mod_base = OTHER; note = 2'-O-methyluridine-3'-phosphate
  modified_base 18: mod_base = OTHER; note = 2'-O-methylguanosine-3'-phosphate
  modified_base 19: mod_base = OTHER; note = 2'-O-methylcytidine-3'-phosphate
  modified_base 20: mod_base = OTHER; note = 2'-O-methylcytidine-3'-phosphate
  modified_base 21: mod_base = OTHER; note 2'-O-methyluridine-3'-phosphate-N-[tris(GalNAc-alkyl)-amido decanoyl)]-4-hydroxyprolinol (Hyp-(GalNAc-alkyl)3)
gctccttcactgaacatgcct

SEQ ID NO: 3738 - RNA, 21 nt, synthetic construct
  source 1..21: mol_type = other RNA
  modified_base 1: mod_base = OTHER; note = 2'-O-methylcytidine-3'- phosphorothioate
  modified_base 2: mod_base = OTHER; note = 2'-O-methyluridine-3'-phosphorothioate
  modified_base 3: mod_base = OTHER; note = 2'-O-methyluridine-3'-phosphate
  modified_base 4: mod_base = OTHER; note = 2'-O-methyluridine-3'-phosphate
  modified_base 5: mod_base = OTHER; note = 2'-O-methyluridine-3'-phosphate
  modified_base 6: mod_base = OTHER; note = 2'-O-methylguanosine-3'-phosphate
  modified_base 7: mod_base = OTHER; note = 2'-fluoroguanosine-3'-phosphate
  modified_base 8: mod_base = OTHER; note = 2'-O-methyluridine-3'-phosphate
  modified_base 9: mod_base = OTHER; note = 2'-fluorouridine-3'-phosphate
  modified_base 10: mod_base = OTHER; note = 2'-fluorocytidine-3'-phosphate
  modified_base 11: mod_base = OTHER; note = 2'-fluorocytidine-3'-phosphate
  modified_base 12: mod_base = OTHER; note = 2'-O-methyladenosine-3'-phosphate
  modified_base 13: mod_base = OTHER; note = 2'-O-methyladenosine-3'-phosphate
  modified_base 14: mod_base = OTHER; note = 2'-O-methylguanosine-3'-phosphate
  modified_base 15: mod_base = OTHER; note = 2'-O-methyluridine-3'-phosphate
  modified_base 16: mod_base = OTHER; note = 2'-O-methylcytidine-3'-phosphate
  modified_base 17: mod_base = OTHER; note = 2'-O-methylcytidine-3'-phosphate
  modified_base 18: mod_base = OTHER; note = 2'-O-methyladenosine-3'-phosphate
  modified_base 19: mod_base = OTHER; note = 2'-O-methyladenosine-3'-phosphate
  modified_base 20: mod_base = OTHER; note = 2'-O-methyluridine-3'-phosphate
  modified_base 21: mod_base = OTHER; note 2'-O-methyladenosine-3'-phosphate-N-[tris(GalNAc-alkyl)-ami dodecanoyl)]-4-hydroxyprolinol (Hyp-(GalNAc-alkyl)3)
cttttggttccaagtccaata

SEQ ID NO: 3739 - RNA, 21 nt, synthetic construct
  source 1..21: mol_type = other RNA
  modified_base 1: mod_base = OTHER; note = 2'-O-methylguanosine-3'- phosphorothioate
  modified_base 2: mod_base = OTHER; note = 2'-O-methylcytidine-3'- phosphorothioate
  modified_base 3: mod_base = OTHER; note = 2'-O-methylcytidine-3'-phosphate
  modified_base 4: mod_base = OTHER; note = 2'-O-methyluridine-3'-phosphate
  modified_base 5: mod_base = OTHER; note = 2'-O-methylguanosine-3'-phosphate
  modified_base 6: mod_base = OTHER; note = 2'-O-methyluridine-3'-phosphate
  modified_base 7: mod_base = OTHER; note = 2'-fluoroguanosine-3'-phosphate
  modified_base 8: mod_base = OTHER; note = 2'-O-methylcytidine-3'-phosphate
  modified_base 9: mod_base = OTHER; note = 2'-fluorocytidine-3'-phosphate
  modified_base 10: mod_base = OTHER; note = 2'-fluoroadenosine-3'-phosphate
  modified_base 11: mod_base = OTHER; note = 2'-fluorouridine-3'-phosphate
  modified_base 12: mod_base = OTHER; note = 2'-O-methylcytidine-3'-phosphate
  modified_base 13: mod_base = OTHER; note = 2'-O-methyladenosine-3'-phosphate
  modified_base 14: mod_base = OTHER; note = 2'-O-methylguanosine-3'-phosphate
  modified_base 15: mod_base = OTHER; note = 2'-O-methyluridine-3'-phosphate
  modified_base 16: mod_base = OTHER; note = 2'-O-methyladenosine-3'-phosphate
  modified_base 17: mod_base = OTHER; note = 2'-O-methyluridine-3'-phosphate
  modified_base 18: mod_base = OTHER; note = 2'-O-methylcytidine-3'-phosphate
  modified_base 19: mod_base = OTHER; note = 2'-O-methyluridine-3'-phosphate
  modified_base 20: mod_base = OTHER; note = 2'-O-methyluridine-3'-phosphate
  modified_base 21: mod_base = OTHER; note 2'-O-methyladenosine-3'-phosphate-N-[tris(GalNAc-alkyl)-ami dodecanoyl)]-4-hydroxyprolinol (Hyp-(GalNAc-alkyl)3)
gcctgtgccatcagtatctta

SEQ ID NO: 3740 - RNA, 21 nt, synthetic construct
  source 1..21: mol_type = other RNA
  modified_base 1: mod_base = OTHER; note = 2'-O-methylguanosine-3'- phosphorothioate
  modified_base 2: mod_base = OTHER; note = 2'-O-methylcytidine-3'- phosphorothioate
  modified_base 3: mod_base = OTHER; note = 2'-O-methyluridine-3'-phosphate
  modified_base 4: mod_base = OTHER; note = 2'-O-methyluridine-3'-phosphate
  modified_base 5: mod_base = OTHER; note = 2'-O-methyladenosine-3'-phosphate
  modified_base 6: mod_base = OTHER; note = 2'-O-methyluridine-3'-phosphate
  modified_base 7: mod_base = OTHER; note = 2'-fluoroguanosine-3'-phosphate
  modified_base 8: mod_base = OTHER; note = 2'-O-methyladenosine-3'-phosphate
  modified_base 9: mod_base = OTHER; note = 2'-fluoroguanosine-3'-phosphate
  modified_base 10: mod_base = OTHER; note = 2'-fluoroguanosine-3'-phosphate
  modified_base 11: mod_base = OTHER; note = 2'-fluorouridine-3'-phosphate
  modified_base 12: mod_base = OTHER; note = 2'-O-methylguanosine-3'-phosphate
  modified_base 13: mod_base = OTHER; note = 2'-O-methyladenosine-3'-phosphate
  modified_base 14: mod_base = OTHER; note = 2'-O-methyluridine-3'-phosphate
  modified_base 15: mod_base = OTHER; note = 2'-O-methylcytidine-3'-phosphate
  modified_base 16: mod_base = OTHER; note = 2'-O-methyladenosine-3'-phosphate
  modified_base 17: mod_base = OTHER; note = 2'-O-methyladenosine-3'-phosphate
  modified_base 18: mod_base = OTHER; note = 2'-O-methyladenosine-3'-phosphate
  modified_base 19: mod_base = OTHER; note = 2'-O-methylcytidine-3'-phosphate
  modified_base 20: mod_base = OTHER; note = 2'-O-methyluridine-3'-phosphate
  modified_base 21: mod_base = OTHER; note 2'-O-methyladenosine-3'-phosphate-N-[tris(GalNAc-alkyl)-ami dodecanoyl)]-4-hydroxyprolinol (Hyp-(GalNAc-alkyl)3)
gcttatgaggtgatcaaacta

SEQ ID NO: 3741 - RNA, 21 nt, synthetic construct
  source 1..21: mol_type = other RNA
  modified_base 1: mod_base = OTHER; note = 2'-O-methylcytidine-3'- phosphorothioate
  modified_base 2: mod_base = OTHER; note = 2'-O-methyluridine-3'-phosphorothioate
  modified_base 3: mod_base = OTHER; note = 2'-O-methyluridine-3'-phosphate
  modified_base 4: mod_base = OTHER; note = 2'-O-methyladenosine-3'-phosphate
  modified_base 5: mod_base = OTHER; note = 2'-O-methyluridine-3'-phosphate
  modified_base 6: mod_base = OTHER; note = 2'-O-methylguanosine-3'-phosphate
  modified_base 7: mod_base = OTHER; note = 2'-fluoroadenosine-3'-phosphate
  modified_base 8: mod_base = OTHER; note = 2'-O-methylguanosine-3'-phosphate
  modified_base 9: mod_base = OTHER; note = 2'-fluoroguanosine-3'-phosphate
  modified_base 10: mod_base = OTHER; note = 2'-fluorouridine-3'-phosphate
  modified_base 11: mod_base = OTHER; note = 2'-fluoroguanosine-3'-phosphate
  modified_base 12: mod_base = OTHER; note = 2'-O-methyladenosine-3'-phosphate
  modified_base 13: mod_base = OTHER; note = 2'-O-methyluridine-3'-phosphate
  modified_base 14: mod_base = OTHER; note = 2'-O-methylcytidine-3'-phosphate
  modified_base 15: mod_base = OTHER; note = 2'-O-methyladenosine-3'-phosphate
  modified_base 16: mod_base = OTHER; note = 2'-O-methyladenosine-3'-phosphate
  modified_base 17: mod_base = OTHER; note = 2'-O-methyladenosine-3'-phosphate
  modified_base 18: mod_base = OTHER; note = 2'-O-methylcytidine-3'-phosphate
  modified_base 19: mod_base = OTHER; note = 2'-O-methyluridine-3'-phosphate
  modified_base 20: mod_base = OTHER; note = 2'-O-methylcytidine-3'-phosphate
  modified_base 21: mod_base = OTHER; note 2'-O-methyladenosine-3'-phosphate-N-[tris(GalNAc-alkyl)-ami dodecanoyl)]-4-hydroxyprolinol (Hyp-(GalNAc-alkyl)3)
cttatgaggtgatcaaactca

SEQ ID NO: 3742 - RNA, 21 nt, synthetic construct
  source 1..21: mol_type = other RNA
  modified_base 1: mod_base = OTHER; note = 2'-O-methylcytidine-3'- phosphorothioate
  modified_base 2: mod_base = OTHER; note = 2'-O-methylcytidine-3'- phosphorothioate
  modified_base 3: mod_base = OTHER; note = 2'-O-methyluridine-3'-phosphate
  modified_base 4: mod_base = OTHER; note = 2'-O-methyluridine-3'-phosphate
  modified_base 5: mod_base = OTHER; note = 2'-O-methylguanosine-3'-phosphate
  modified_base 6: mod_base = OTHER; note = 2'-O-methylcytidine-3'-phosphate
  modified_base 7: mod_base = OTHER; note = 2'-fluoroadenosine-3'-phosphate
  modified_base 8: mod_base = OTHER; note = 2'-O-methyluridine-3'-phosphate
  modified_base 9: mod_base = OTHER; note = 2'-fluorouridine-3'-phosphate
  modified_base 10: mod_base = OTHER; note = 2'-fluorouridine-3'-phosphate
  modified_base 11: mod_base = OTHER; note = 2'-fluorouridine-3'-phosphate
  modified_base 12: mod_base = OTHER; note = 2'-O-methylguanosine-3'-phosphate
  modified_base 13: mod_base = OTHER; note = 2'-O-methylguanosine-3'-phosphate
  modified_base 14: mod_base = OTHER; note = 2'-O-methylguanosine-3'-phosphate
  modified_base 15: mod_base = OTHER; note = 2'-O-methyladenosine-3'-phosphate
  modified_base 16: mod_base = OTHER; note = 2'-O-methylcytidine-3'-phosphate
  modified_base 17: mod_base = OTHER; note = 2'-O-methyladenosine-3'-phosphate
  modified_base 18: mod_base = OTHER; note = 2'-O-methylguanosine-3'-phosphate
  modified_base 19: mod_base = OTHER; note = 2'-O-methyladenosine-3'-phosphate
  modified_base 20: mod_base = OTHER; note = 2'-O-methyladenosine-3'-phosphate
  modified_base 21: mod_base = OTHER; note 2'-O-methyluridine-3'-phosphate-N-[tris(GalNAc-alkyl)-amido decanoyl)]-4-hydroxyprolinol (Hyp-(GalNAc-alkyl)3)
ccttgcattttgggacagaat

SEQ ID NO: 3743 - RNA, 21 nt, synthetic construct
  source 1..21: mol_type = other RNA
  modified_base 1: mod_base = OTHER; note = 2'-O-methylguanosine-3'- phosphorothioate
  modified_base 2: mod_base = OTHER; note = 2'-O-methylguanosine-3'- phosphorothioate
  modified_base 3: mod_base = OTHER; note = 2'-O-methyluridine-3'-phosphate
  modified_base 4: mod_base = OTHER; note = 2'-O-methyluridine-3'-phosphate
  modified_base 5: mod_base = OTHER; note = 2'-O-methylcytidine-3'-phosphate
  modified_base 6: mod_base = OTHER; note = 2'-O-methylcytidine-3'-phosphate
  modified_base 7: mod_base = OTHER; note = 2'-fluoroadenosine-3'-phosphate
  modified_base 8: mod_base = OTHER; note = 2'-O-methyladenosine-3'-phosphate
  modified_base 9: mod_base = OTHER; note = 2'-fluoroguanosine-3'-phosphate
  modified_base 10: mod_base = OTHER; note = 2'-fluorouridine-3'-phosphate
  modified_base 11: mod_base = OTHER; note = 2'-fluorocytidine-3'-phosphate
  modified_base 12: mod_base = OTHER; note = 2'-O-methylcytidine-3'-phosphate
  modified_base 13: mod_base = OTHER; note = 2'-O-methyladenosine-3'-phosphate
  modified_base 14: mod_base = OTHER; note = 2'-O-methyladenosine-3'-phosphate
  modified_base 15: mod_base = OTHER; note = 2'-O-methyluridine-3'-phosphate
  modified_base 16: mod_base = OTHER; note = 2'-O-methyladenosine-3'-phosphate
  modified_base 17: mod_base = OTHER; note = 2'-O-methyluridine-3'-phosphate
  modified_base 18: mod_base = OTHER; note = 2'-O-methylguanosine-3'-phosphate
  modified_base 19: mod_base = OTHER; note = 2'-O-methylguanosine-3'-phosphate
  modified_base 20: mod_base = OTHER; note = 2'-O-methylcytidine-3'-phosphate
  modified_base 21: mod_base = OTHER; note 2'-O-methyladenosine-3'-phosphate-N-[tris(GalNAc-alkyl)-ami dodecanoyl)]-4-hydroxyprolinol (Hyp-(GalNAc-alkyl)3)
ggttccaagtccaatatggca

SEQ ID NO: 3744 - RNA, 21 nt, synthetic construct
  source 1..21: mol_type = other RNA
  modified_base 1: mod_base = OTHER; note = 2'-O-methylcytidine-3'- phosphorothioate
  modified_base 2: mod_base = OTHER; note = 2'-O-methyladenosine-3'- phosphorothioate
  modified_base 3: mod_base = OTHER; note = 2'-O-methylcytidine-3'-phosphate
  modified_base 4: mod_base = OTHER; note = 2'-O-methyluridine-3'-phosphate
  modified_base 5: mod_base = OTHER; note = 2'-O-methylguanosine-3'-phosphate
  modified_base 6: mod_base = OTHER; note = 2'-O-methyluridine-3'-phosphate
  modified_base 7: mod_base = OTHER; note = 2'-fluorocytidine-3'-phosphate
  modified_base 8: mod_base = OTHER; note = 2'-O-methyluridine-3'-phosphate
  modified_base 9: mod_base = OTHER; note = 2'-fluoroadenosine-3'-phosphate
  modified_base 10: mod_base = OTHER; note = 2'-fluoroguanosine-3'-phosphate
  modified_base 11: mod_base = OTHER; note = 2'-fluoroguanosine-3'-phosphate
  modified_base 12: mod_base = OTHER; note = 2'-O-methylcytidine-3'-phosphate
  modified_base 13: mod_base = OTHER; note = 2'-O-methyluridine-3'-phosphate
  modified_base 14: mod_base = OTHER; note = 2'-O-methyladenosine-3'-phosphate
  modified_base 15: mod_base = OTHER; note = 2'-O-methylcytidine-3'-phosphate
  modified_base 16: mod_base = OTHER; note = 2'-O-methyladenosine-3'-phosphate
  modified_base 17: mod_base = OTHER; note = 2'-O-methyladenosine-3'-phosphate
  modified_base 18: mod_base = OTHER; note = 2'-O-methylcytidine-3'-phosphate
  modified_base 19: mod_base = OTHER; note = 2'-O-methyladenosine-3'-phosphate
  modified_base 20: mod_base = OTHER; note = 2'-O-methylguanosine-3'-phosphate
  modified_base 21: mod_base = OTHER; note 2'-O-methyladenosine-3'-phosphate-N-[tris(GalNAc-alkyl)-ami dodecanoyl)]-4-hydroxyprolinol (Hyp-(GalNAc-alkyl)3)
cactgtctaggctacaacaga

SEQ ID NO: 3745 - RNA, 21 nt, synthetic construct
  source 1..21: mol_type = other RNA
  modified_base 1: mod_base = OTHER; note = 2'-O-methyladenosine-3'- phosphorothioate
  modified_base 2: mod_base = OTHER; note = 2'-O-methylcytidine-3'- phosphorothioate
  modified_base 3: mod_base = OTHER; note = 2'-O-methyluridine-3'-phosphate
  modified_base 4: mod_base = OTHER; note = 2'-O-methylguanosine-3'-phosphate
  modified_base 5: mod_base = OTHER; note = 2'-O-methyluridine-3'-phosphate
  modified_base 6: mod_base = OTHER; note = 2'-O-methylcytidine-3'-phosphate
  modified_base 7: mod_base = OTHER; note = 2'-fluorouridine-3'-phosphate
  modified_base 8: mod_base = OTHER; note = 2'-O-methyladenosine-3'-phosphate
  modified_base 9: mod_base = OTHER; note = 2'-fluoroguanosine-3'-phosphate
  modified_base 10: mod_base = OTHER; note = 2'-fluoroguanosine-3'-phosphate
  modified_base 11: mod_base = OTHER; note = 2'-fluorocytidine-3'-phosphate
  modified_base 12: mod_base = OTHER; note = 2'-O-methyluridine-3'-phosphate
  modified_base 13: mod_base = OTHER; note = 2'-O-methyladenosine-3'-phosphate
  modified_base 14: mod_base = OTHER; note = 2'-O-methylcytidine-3'-phosphate
  modified_base 15: mod_base = OTHER; note = 2'-O-methyladenosine-3'-phosphate
  modified_base 16: mod_base = OTHER; note = 2'-O-methyladenosine-3'-phosphate
  modified_base 17: mod_base = OTHER; note = 2'-O-methylcytidine-3'-phosphate
  modified_base 18: mod_base = OTHER; note = 2'-O-methyladenosine-3'-phosphate
  modified_base 19: mod_base = OTHER; note = 2'-O-methylguanosine-3'-phosphate
  modified_base 20: mod_base = OTHER; note = 2'-O-methylguanosine-3'-phosphate
  modified_base 21: mod_base = OTHER; note 2'-O-methyladenosine-3'-phosphate-N-[tris(GalNAc-alkyl)-ami dodecanoyl)]-4-hydroxyprolinol (Hyp-(GalNAc-alkyl)3)
actgtctaggctacaacagga

SEQ ID NO: 3746 - RNA, 21 nt, synthetic construct
  source 1..21: mol_type = other RNA
  modified_base 1: mod_base = OTHER; note = 2'-O-methyladenosine-3'- phosphorothioate
  modified_base 2: mod_base = OTHER; note = 2'-O-methyladenosine-3'- phosphorothioate
  modified_base 3: mod_base = OTHER; note = 2'-O-methyluridine-3'-phosphate
  modified_base 4: mod_base = OTHER; note = 2'-O-methyladenosine-3'-phosphate
  modified_base 5: mod_base = OTHER; note = 2'-O-methyladenosine-3'-phosphate
  modified_base 6: mod_base = OTHER; note = 2'-O-methylguanosine-3'-phosphate
  modified_base 7: mod_base = OTHER; note = 2'-fluoroadenosine-3'-phosphate
  modified_base 8: mod_base = OTHER; note = 2'-O-methyluridine-3'-phosphate
  modified_base 9: mod_base = OTHER; note = 2'-fluorouridine-3'-phosphate
  modified_base 10: mod_base = OTHER; note = 2'-fluoroadenosine-3'-phosphate
  modified_base 11: mod_base = OTHER; note = 2'-fluorocytidine-3'-phosphate
  modified_base 12: mod_base = OTHER; note = 2'-O-methyladenosine-3'-phosphate
  modified_base 13: mod_base = OTHER; note = 2'-O-methylguanosine-3'-phosphate
  modified_base 14: mod_base = OTHER; note = 2'-O-methyluridine-3'-phosphate
  modified_base 15: mod_base = OTHER; note = 2'-O-methyluridine-3'-phosphate
  modified_base 16: mod_base = OTHER; note = 2'-O-methylguanosine-3'-phosphate
  modified_base 17: mod_base = OTHER; note = 2'-O-methyluridine-3'-phosphate
  modified_base 18: mod_base = OTHER; note = 2'-O-methyluridine-3'-phosphate
  modified_base 19: mod_base = OTHER; note = 2'-O-methylguanosine-3'-phosphate
  modified_base 20: mod_base = OTHER; note = 2'-O-methylguanosine-3'-phosphate
  modified_base 21: mod_base = OTHER; note 2'-O-methyladenosine-3'-phosphate-N-[tris(GalNAc-alkyl)-ami dodecanoyl)]-4-hydroxyprolinol (Hyp-(GalNAc-alkyl)3)
aataagattacagttgttgga

SEQ ID NO: 3747 - RNA, 21 nt, synthetic construct
  source 1..21: mol_type = other RNA
  modified_base 1: mod_base = OTHER; note = 2'-O-methylguanosine-3'- phosphorothioate
  modified_base 2: mod_base = OTHER; note = 2'-O-methyluridine-3'-phosphorothioate
  modified_base 3: mod_base = OTHER; note = 2'-O-methyluridine-3'-phosphate
  modified_base 4: mod_base = OTHER; note = 2'-O-methylguanosine-3'-phosphate
  modified_base 5: mod_base = OTHER; note = 2'-O-methyladenosine-3'-phosphate
  modified_base 6: mod_base = OTHER; note = 2'-O-methylguanosine-3'-phosphate
  modified_base 7: mod_base = OTHER; note = 2'-fluoroadenosine-3'-phosphate
  modified_base 8: mod_base = OTHER; note = 2'-O-methylguanosine-3'-phosphate
  modified_base 9: mod_base = OTHER; note = 2'-fluorouridine-3'-phosphate
  modified_base 10: mod_base = OTHER; note = 2'-fluoroguanosine-3'-phosphate
  modified_base 11: mod_base = OTHER; note = 2'-fluorocytidine-3'-phosphate
  modified_base 12: mod_base = OTHER; note = 2'-O-methyluridine-3'-phosphate
  modified_base 13: mod_base = OTHER; note = 2'-O-methyluridine-3'-phosphate
  modified_base 14: mod_base = OTHER; note = 2'-O-methyladenosine-3'-phosphate
  modified_base 15: mod_base = OTHER; note = 2'-O-methyluridine-3'-phosphate
  modified_base 16: mod_base = OTHER; note = 2'-O-methylguanosine-3'-phosphate
  modified_base 17: mod_base = OTHER; note = 2'-O-methyladenosine-3'-phosphate
  modified_base 18: mod_base = OTHER; note = 2'-O-methylguanosine-3'-phosphate
  modified_base 19: mod_base = OTHER; note = 2'-O-methylguanosine-3'-phosphate
  modified_base 20: mod_base = OTHER; note = 2'-O-methyluridine-3'-phosphate
  modified_base 21: mod_base = OTHER; note 2'-O-methyladenosine-3'-phosphate-N-[tris(GalNAc-alkyl)-ami dodecanoyl)]-4-hydroxyprolinol (Hyp-(GalNAc-alkyl)3)
gttgagagtgcttatgaggta

SEQ ID NO: 3748 - RNA, 21 nt, synthetic construct
  source 1..21: mol_type = other RNA
  modified_base 1: mod_base = OTHER; note = 2'-O-methylguanosine-3'- phosphorothioate
  modified_base 2: mod_base = OTHER; note = 2'-O-methyluridine-3'-phosphorothioate
  modified_base 3: mod_base = OTHER; note = 2'-O-methylcytidine-3'-phosphate
  modified_base 4: mod_base = OTHER; note = 2'-O-methyluridine-3'-phosphate
  modified_base 5: mod_base = OTHER; note = 2'-O-methyladenosine-3'-phosphate
  modified_base 6: mod_base = OTHER; note = 2'-O-methylguanosine-3'-phosphate
  modified_base 7: mod_base = OTHER; note = 2'-fluoroguanosine-3'-phosphate
  modified_base 8: mod_base = OTHER; note = 2'-O-methylcytidine-3'-phosphate
  modified_base 9: mod_base = OTHER; note = 2'-fluorouridine-3'-phosphate
  modified_base 10: mod_base = OTHER; note = 2'-fluoroadenosine-3'-phosphate
  modified_base 11: mod_base = OTHER; note = 2'-fluorocytidine-3'-phosphate
  modified_base 12: mod_base = OTHER; note = 2'-O-methyladenosine-3'-phosphate
  modified_base 13: mod_base = OTHER; note = 2'-O-methyladenosine-3'-phosphate
  modified_base 14: mod_base = OTHER; note = 2'-O-methylcytidine-3'-phosphate
  modified_base 15: mod_base = OTHER; note = 2'-O-methyladenosine-3'-phosphate
  modified_base 16: mod_base = OTHER; note = 2'-O-methylguanosine-3'-phosphate
  modified_base 17: mod_base = OTHER; note = 2'-O-methylguanosine-3'-phosphate
  modified_base 18: mod_base = OTHER; note = 2'-O-methyladenosine-3'-phosphate
  modified_base 19: mod_base = OTHER; note = 2'-O-methyluridine-3'-phosphate
  modified_base 20: mod_base = OTHER; note = 2'-O-methyluridine-3'-phosphate
  modified_base 21: mod_base = OTHER; note 2'-O-methyladenosine-3'-phosphate-N-[tris(GalNAc-alkyl)-ami dodecanoyl)]-4-hydroxyprolinol (Hyp-(GalNAc-alkyl)3)
gtctaggctacaacaggatta

SEQ ID NO: 3749 - RNA, 21 nt, synthetic construct
  source 1..21: mol_type = other RNA
  modified_base 1: mod_base = OTHER; note = 2'-O-methyluridine-3'-phosphorothioate
  modified_base 2: mod_base = OTHER; note = 2'-O-methylcytidine-3'- phosphorothioate
  modified_base 3: mod_base = OTHER; note = 2'-O-methyluridine-3'-phosphate
  modified_base 4: mod_base = OTHER; note = 2'-O-methyladenosine-3'-phosphate
  modified_base 5: mod_base = OTHER; note = 2'-O-methylguanosine-3'-phosphate
  modified_base 6: mod_base = OTHER; note = 2'-O-methylguanosine-3'-phosphate
  modified_base 7: mod_base = OTHER; note = 2'-fluorocytidine-3'-phosphate
  modified_base 8: mod_base = OTHER; note = 2'-O-methyluridine-3'-phosphate
  modified_base 9: mod_base = OTHER; note = 2'-fluoroadenosine-3'-phosphate
  modified_base 10: mod_base = OTHER; note = 2'-fluorocytidine-3'-phosphate
  modified_base 11: mod_base = OTHER; note = 2'-fluoroadenosine-3'-phosphate
  modified_base 12: mod_base = OTHER; note = 2'-O-methyladenosine-3'-phosphate
  modified_base 13: mod_base = OTHER; note = 2'-O-methylcytidine-3'-phosphate
  modified_base 14: mod_base = OTHER; note = 2'-O-methyladenosine-3'-phosphate
  modified_base 15: mod_base = OTHER; note = 2'-O-methylguanosine-3'-phosphate
  modified_base 16: mod_base = OTHER; note = 2'-O-methylguanosine-3'-phosphate
  modified_base 17: mod_base = OTHER; note = 2'-O-methyladenosine-3'-phosphate
  modified_base 18: mod_base = OTHER; note = 2'-O-methyluridine-3'-phosphate
  modified_base 19: mod_base = OTHER; note = 2'-O-methyluridine-3'-phosphate
  modified_base 20: mod_base = OTHER; note = 2'-O-methylcytidine-3'-phosphate
  modified_base 21: mod_base = OTHER; note 2'-O-methyluridine-3'-phosphate-N-[tris(GalNAc-alkyl)-amido decanoyl)]-4-hydroxyprolinol (Hyp-(GalNAc-alkyl)3)
tctaggctacaacaggattct

SEQ ID NO: 3750 - RNA, 21 nt, synthetic construct
  source 1..21: mol_type = other RNA
  modified_base 1: mod_base = OTHER; note = 2'-O-methylguanosine-3'- phosphorothioate
  modified_base 2: mod_base = OTHER; note = 2'-O-methyluridine-3'-phosphorothioate
  modified_base 3: mod_base = OTHER; note = 2'-O-methylguanosine-3'-phosphate
  modified_base 4: mod_base = OTHER; note = 2'-O-methylguanosine-3'-phosphate
  modified_base 5: mod_base = OTHER; note = 2'-O-methyladenosine-3'-phosphate
  modified_base 6: mod_base = OTHER; note = 2'-O-methylguanosine-3'-phosphate
  modified_base 7: mod_base = OTHER; note = 2'-fluoroguanosine-3'-phosphate
  modified_base 8: mod_base = OTHER; note = 2'-O-methyluridine-3'-phosphate
  modified_base 9: mod_base = OTHER; note = 2'-fluorouridine-3'-phosphate
  modified_base 10: mod_base = OTHER; note = 2'-fluoroguanosine-3'-phosphate
  modified_base 11: mod_base = OTHER; note = 2'-fluorouridine-3'-phosphate
  modified_base 12: mod_base = OTHER; note = 2'-O-methylguanosine-3'-phosphate
  modified_base 13: mod_base = OTHER; note = 2'-O-methylcytidine-3'-phosphate
  modified_base 14: mod_base = OTHER; note = 2'-O-methyladenosine-3'-phosphate
  modified_base 15: mod_base = OTHER; note = 2'-O-methyluridine-3'-phosphate
  modified_base 16: mod_base = OTHER; note = 2'-O-methylguanosine-3'-phosphate
  modified_base 17: mod_base = OTHER; note = 2'-O-methyluridine-3'-phosphate
  modified_base 18: mod_base = OTHER; note = 2'-O-methyluridine-3'-phosphate
  modified_base 19: mod_base = OTHER; note = 2'-O-methylguanosine-3'-phosphate
  modified_base 20: mod_base = OTHER; note = 2'-O-methyluridine-3'-phosphate
  modified_base 21: mod_base = OTHER; note 2'-O-methyladenosine-3'-phosphate-N-[tris(GalNAc-alkyl)-ami dodecanoyl)]-4-hydroxyprolinol (Hyp-(GalNAc-alkyl)3)
gtggaggttgtgcatgttgta

SEQ ID NO: 3751 - RNA, 21 nt, synthetic construct
  source 1..21: mol_type = other RNA
  modified_base 1: mod_base = OTHER; note = 2'-O-methyluridine-3'-phosphorothioate
  modified_base 2: mod_base = OTHER; note = 2'-O-methylguanosine-3'- phosphorothioate
  modified_base 3: mod_base = OTHER; note = 2'-O-methyladenosine-3'-phosphate
  modified_base 4: mod_base = OTHER; note = 2'-O-methylguanosine-3'-phosphate
  modified_base 5: mod_base = OTHER; note = 2'-O-methylguanosine-3'-phosphate
  modified_base 6: mod_base = OTHER; note = 2'-O-methyluridine-3'-phosphate
  modified_base 7: mod_base = OTHER; note = 2'-fluoroguanosine-3'-phosphate
  modified_base 8: mod_base = OTHER; note = 2'-O-methyladenosine-3'-phosphate
  modified_base 9: mod_base = OTHER; note = 2'-fluorouridine-3'-phosphate
  modified_base 10: mod_base = OTHER; note = 2'-fluorocytidine-3'-phosphate
  modified_base 11: mod_base = OTHER; note = 2'-fluoroadenosine-3'-phosphate
  modified_base 12: mod_base = OTHER; note = 2'-O-methyladenosine-3'-phosphate
  modified_base 13: mod_base = OTHER; note = 2'-O-methyladenosine-3'-phosphate
  modified_base 14: mod_base = OTHER; note = 2'-O-methylcytidine-3'-phosphate
  modified_base 15: mod_base = OTHER; note = 2'-O-methyluridine-3'-phosphate
  modified_base 16: mod_base = OTHER; note = 2'-O-methylcytidine-3'-phosphate
  modified_base 17: mod_base = OTHER; note = 2'-O-methyladenosine-3'-phosphate
  modified_base 18: mod_base = OTHER; note = 2'-O-methyladenosine-3'-phosphate
  modified_base 19: mod_base = OTHER; note = 2'-O-methyladenosine-3'-phosphate
  modified_base 20: mod_base = OTHER; note = 2'-O-methylguanosine-3'-phosphate
  modified_base 21: mod_base = OTHER; note 2'-O-methyladenosine-3'-phosphate-N-[tris(GalNAc-alkyl)-ami dodecanoyl)]-4-hydroxyprolinol (Hyp-(GalNAc-alkyl)3)
tgaggtgatcaaactcaaaga

SEQ ID NO: 3752 - RNA, 21 nt, synthetic construct
  source 1..21: mol_type = other RNA
  modified_base 1: mod_base = OTHER; note = 2'-O-methylguanosine-3'- phosphorothioate
  modified_base 2: mod_base = OTHER; note = 2'-O-methyluridine-3'-phosphorothioate
  modified_base 3: mod_base = OTHER; note = 2'-O-methylguanosine-3'-phosphate
  modified_base 4: mod_base = OTHER; note = 2'-O-methyladenosine-3'-phosphate
  modified_base 5: mod_base = OTHER; note = 2'-O-methyluridine-3'-phosphate
  modified_base 6: mod_base = OTHER; note = 2'-O-methylcytidine-3'-phosphate
  modified_base 7: mod_base = OTHER; note = 2'-fluoroadenosine-3'-phosphate
  modified_base 8: mod_base = OTHER; note = 2'-O-methyladenosine-3'-phosphate
  modified_base 9: mod_base = OTHER; note = 2'-fluoroadenosine-3'-phosphate
  modified_base 10: mod_base = OTHER; note = 2'-fluorocytidine-3'-phosphate
  modified_base 11: mod_base = OTHER; note = 2'-fluorouridine-3'-phosphate
  modified_base 12: mod_base = OTHER; note = 2'-O-methylcytidine-3'-phosphate
  modified_base 13: mod_base = OTHER; note = 2'-O-methyladenosine-3'-phosphate
  modified_base 14: mod_base = OTHER; note = 2'-O-methyladenosine-3'-phosphate
  modified_base 15: mod_base = OTHER; note = 2'-O-methyladenosine-3'-phosphate
  modified_base 16: mod_base = OTHER; note = 2'-O-methylguanosine-3'-phosphate
  modified_base 17: mod_base = OTHER; note = 2'-O-methylguanosine-3'-phosphate
  modified_base 18: mod_base = OTHER; note = 2'-O-methylcytidine-3'-phosphate
  modified_base 19: mod_base = OTHER; note = 2'-O-methyluridine-3'-phosphate
  modified_base 20: mod_base = OTHER; note = 2'-O-methyladenosine-3'-phosphate
  modified_base 21: mod_base = OTHER; note 2'-O-methyladenosine-3'-phosphate-N-[tris(GalNAc-alkyl)-ami dodecanoyl)]-4-hydroxyprolinol (Hyp-(GalNAc-alkyl)3)
gtgatcaaactcaaaggctaa

SEQ ID NO: 3753 - RNA, 21 nt, synthetic construct
  source 1..21: mol_type = other RNA
  modified_base 1: mod_base = OTHER; note = 2'-O-methyluridine-3'-phosphorothioate
  modified_base 2: mod_base = OTHER; note = 2'-O-methylguanosine-3'- phosphorothioate
  modified_base 3: mod_base = OTHER; note = 2'-O-methyladenosine-3'-phosphate
  modified_base 4: mod_base = OTHER; note = 2'-O-methylguanosine-3'-phosphate
  modified_base 5: mod_base = OTHER; note = 2'-O-methylguanosine-3'-phosphate
  modified_base 6: mod_base = OTHER; note = 2'-O-methyladenosine-3'-phosphate
  modified_base 7: mod_base = OTHER; note = 2'-fluoroadenosine-3'-phosphate
  modified_base 8: mod_base = OTHER; note = 2'-O-methylguanosine-3'-phosphate
  modified_base 9: mod_base = OTHER; note = 2'-fluoroadenosine-3'-phosphate
  modified_base 10: mod_base = OTHER; note = 2'-fluoroguanosine-3'-phosphate
  modified_base 11: mod_base = OTHER; note = 2'-fluoroguanosine-3'-phosphate
  modified_base 12: mod_base = OTHER; note = 2'-O-methylcytidine-3'-phosphate
  modified_base 13: mod_base = OTHER; note = 2'-O-methylcytidine-3'-phosphate
  modified_base 14: mod_base = OTHER; note = 2'-O-methylcytidine-3'-phosphate
  modified_base 15: mod_base = OTHER; note = 2'-O-methylguanosine-3'-phosphate
  modified_base 16: mod_base = OTHER; note = 2'-O-methyluridine-3'-phosphate
  modified_base 17: mod_base = OTHER; note = 2'-O-methyluridine-3'-phosphate
  modified_base 18: mod_base = OTHER; note = 2'-O-methyluridine-3'-phosphate
  modified_base 19: mod_base = OTHER; note = 2'-O-methylguanosine-3'-phosphate
  modified_base 20: mod_base = OTHER; note = 2'-O-methyladenosine-3'-phosphate
  modified_base 21: mod_base = OTHER; note 2'-O-methyladenosine-3'-phosphate-N-[tris(GalNAc-alkyl)-ami dodecanoyl)]-4-hydroxyprolinol (Hyp-(GalNAc-alkyl)3)
tgaggaagaggcccgtttgaa

SEQ ID NO: 3754 - RNA, 21 nt, synthetic construct
  source 1..21: mol_type = other RNA
  modified_base 1: mod_base = OTHER; note = 2'-O-methyladenosine-3'- phosphorothioate
  modified_base 2: mod_base = OTHER; note = 2'-O-methylcytidine-3'- phosphorothioate
  modified_base 3: mod_base = OTHER; note = 2'-O-methyladenosine-3'-phosphate
  modified_base 4: mod_base = OTHER; note = 2'-O-methyladenosine-3'-phosphate
  modified_base 5: mod_base = OTHER; note = 2'-O-methylguanosine-3'-phosphate
  modified_base 6: mod_base = OTHER; note = 2'-O-methylcytidine-3'-phosphate
  modified_base 7: mod_base = OTHER; note = 2'-fluoroadenosine-3'-phosphate
  modified_base 8: mod_base = OTHER; note = 2'-O-methylguanosine-3'-phosphate
  modified_base 9: mod_base = OTHER; note = 2'-fluoroguanosine-3'-phosphate
  modified_base 10: mod_base = OTHER; note = 2'-fluorouridine-3'-phosphate
  modified_base 11: mod_base = OTHER; note = 2'-fluoroguanosine-3'-phosphate
  modified_base 12: mod_base = OTHER; note = 2'-O-methylguanosine-3'-phosphate
  modified_base 13: mod_base = OTHER; note = 2'-O-methyluridine-3'-phosphate
  modified_base 14: mod_base = OTHER; note = 2'-O-methyluridine-3'-phosphate
  modified_base 15: mod_base = OTHER; note = 2'-O-methylguanosine-3'-phosphate
  modified_base 16: mod_base = OTHER; note = 2'-O-methyladenosine-3'-phosphate
  modified_base 17: mod_base = OTHER; note = 2'-O-methylguanosine-3'-phosphate
  modified_base 18: mod_base = OTHER; note = 2'-O-methyladenosine-3'-phosphate
  modified_base 19: mod_base = OTHER; note = 2'-O-methylguanosine-3'-phosphate
  modified_base 20: mod_base = OTHER; note = 2'-O-methyluridine-3'-phosphate
  modified_base 21: mod_base = OTHER; note 2'-O-methyladenosine-3'-phosphate-N-[tris(GalNAc-alkyl)-ami dodecanoyl)]-4-hydroxyprolinol (Hyp-(GalNAc-alkyl)3)
acaagcaggtggttgagagta

SEQ ID NO: 3755 - RNA, 21 nt, synthetic construct
  source 1..21: mol_type = other RNA
  modified_base 1: mod_base = OTHER; note = 2'-O-methylcytidine-3'- phosphorothioate
  modified_base 2: mod_base = OTHER; note = 2'-O-methyladenosine-3'- phosphorothioate
  modified_base 3: mod_base = OTHER; note = 2'-O-methylguanosine-3'-phosphate
  modified_base 4: mod_base = OTHER; note = 2'-O-methyladenosine-3'-phosphate
  modified_base 5: mod_base = OTHER; note = 2'-O-methyluridine-3'-phosphate
  modified_base 6: mod_base = OTHER; note = 2'-O-methyluridine-3'-phosphate
  modified_base 7: mod_base = OTHER; note = 2'-fluorouridine-3'-phosphate
  modified_base 8: mod_base = OTHER; note = 2'-O-methylguanosine-3'-phosphate
  modified_base 9: mod_base = OTHER; note = 2'-fluoroguanosine-3'-phosphate
  modified_base 10: mod_base = OTHER; note = 2'-fluorocytidine-3'-phosphate
  modified_base 11: mod_base = OTHER; note = 2'-fluoroadenosine-3'-phosphate
  modified_base 12: mod_base = OTHER; note = 2'-O-methylguanosine-3'-phosphate
  modified_base 13: mod_base = OTHER; note = 2'-O-methyladenosine-3'-phosphate
  modified_base 14: mod_base = OTHER; note = 2'-O-methylguanosine-3'-phosphate
  modified_base 15: mod_base = OTHER; note = 2'-O-methyladenosine-3'-phosphate
  modified_base 16: mod_base = OTHER; note = 2'-O-methylguanosine-3'-phosphate
  modified_base 17: mod_base = OTHER; note = 2'-O-methyluridine-3'-phosphate
  modified_base 18: mod_base = OTHER; note = 2'-O-methyladenosine-3'-phosphate
  modified_base 19: mod_base = OTHER; note = 2'-O-methyluridine-3'-phosphate
  modified_base 20: mod_base = OTHER; note = 2'-O-methyladenosine-3'-phosphate
  modified_base 21: mod_base = OTHER; note 2'-O-methyladenosine-3'-phosphate-N-[tris(GalNAc-alkyl)-ami dodecanoyl)]-4-hydroxyprolinol (Hyp-(GalNAc-alkyl)3)
cagatttggcagagagtataa

SEQ ID NO: 3756 - RNA, 21 nt, synthetic construct
  source 1..21: mol_type = other RNA
  modified_base 1: mod_base = OTHER; note = 2'-O-methylguanosine-3'- phosphorothioate
  modified_base 2: mod_base = OTHER; note = 2'-O-methyluridine-3'-phosphorothioate
  modified_base 3: mod_base = OTHER; note = 2'-O-methylguanosine-3'-phosphate
  modified_base 4: mod_base = OTHER; note = 2'-O-methylcytidine-3'-phosphate
  modified_base 5: mod_base = OTHER; note = 2'-O-methyluridine-3'-phosphate
  modified_base 6: mod_base = OTHER; note = 2'-O-methyluridine-3'-phosphate
  modified_base 7: mod_base = OTHER; note = 2'-fluoroadenosine-3'-phosphate
  modified_base 8: mod_base = OTHER; note = 2'-O-methyluridine-3'-phosphate
  modified_base 9: mod_base = OTHER; note = 2'-fluoroguanosine-3'-phosphate
  modified_base 10: mod_base = OTHER; note = 2'-fluoroadenosine-3'-phosphate
  modified_base 11: mod_base = OTHER; note = 2'-fluoroguanosine-3'-phosphate
  modified_base 12: mod_base = OTHER; note = 2'-O-methylguanosine-3'-phosphate
  modified_base 13: mod_base = OTHER; note = 2'-O-methyluridine-3'-phosphate
  modified_base 14: mod_base = OTHER; note = 2'-O-methylguanosine-3'-phosphate
  modified_base 15: mod_base = OTHER; note = 2'-O-methyladenosine-3'-phosphate
  modified_base 16: mod_base = OTHER; note = 2'-O-methyluridine-3'-phosphate
  modified_base 17: mod_base = OTHER; note = 2'-O-methylcytidine-3'-phosphate
  modified_base 18: mod_base = OTHER; note = 2'-O-methyladenosine-3'-phosphate
  modified_base 19: mod_base = OTHER; note = 2'-O-methyladenosine-3'-phosphate
  modified_base 20: mod_base = OTHER; note = 2'-O-methyladenosine-3'-phosphate
  modified_base 21: mod_base = OTHER; note 2'-O-methylcytidine-3'-phosphate-N-[tris(GalNAc-alkyl)-amid odecanoyl)]-4-hydroxyprolinol (Hyp-(GalNAc-alkyl)3)
gtgcttatgaggtgatcaaac

SEQ ID NO: 3757 - RNA, 21 nt, synthetic construct
  source 1..21: mol_type = other RNA
  modified_base 1: mod_base = OTHER; note = 2'-O-methyladenosine-3'- phosphorothioate
  modified_base 2: mod_base = OTHER; note = 2'-O-methylguanosine-3'- phosphorothioate
  modified_base 3: mod_base = OTHER; note = 2'-O-methylcytidine-3'-phosphate
  modified_base 4: mod_base = OTHER; note = 2'-O-methyladenosine-3'-phosphate
  modified_base 5: mod_base = OTHER; note = 2'-O-methylguanosine-3'-phosphate
  modified_base 6: mod_base = OTHER; note = 2'-O-methyladenosine-3'-phosphate
  modified_base 7: mod_base = OTHER; note = 2'-fluorouridine-3'-phosphate
  modified_base 8: mod_base = OTHER; note = 2'-O-methyluridine-3'-phosphate
  modified_base 9: mod_base = OTHER; note = 2'-fluorouridine-3'-phosphate
  modified_base 10: mod_base = OTHER; note = 2'-fluoroguanosine-3'-phosphate
  modified_base 11: mod_base = OTHER; note = 2'-fluoroguanosine-3'-phosphate
  modified_base 12: mod_base = OTHER; note = 2'-O-methylcytidine-3'-phosphate
  modified_base 13: mod_base = OTHER; note = 2'-O-methyladenosine-3'-phosphate
  modified_base 14: mod_base = OTHER; note = 2'-O-methylguanosine-3'-phosphate
  modified_base 15: mod_base = OTHER; note = 2'-O-methyladenosine-3'-phosphate
  modified_base 16: mod_base = OTHER; note = 2'-O-methylguanosine-3'-phosphate
  modified_base 17: mod_base = OTHER; note = 2'-O-methyladenosine-3'-phosphate
  modified_base 18: mod_base = OTHER; note = 2'-O-methylguanosine-3'-phosphate
  modified_base 19: mod_base = OTHER; note = 2'-O-methyluridine-3'-phosphate
  modified_base 20: mod_base = OTHER; note = 2'-O-methyladenosine-3'-phosphate
  modified_base 21: mod_base = OTHER; note 2'-O-methyluridine-3'-phosphate-N-[tris(GalNAc-alkyl)-amido decanoyl)]-4-hydroxyprolinol (Hyp-(GalNAc-alkyl)3)
agcagatttggcagagagtat

SEQ ID NO: 3758 - RNA, 21 nt, synthetic construct
  source 1..21: mol_type = other RNA
  modified_base 1: mod_base = OTHER; note = 2'-O-methyladenosine-3'- phosphorothioate
  modified_base 2: mod_base = OTHER; note = 2'-O-methyluridine-3'-phosphorothioate
  modified_base 3: mod_base = OTHER; note = 2'-O-methyluridine-3'-phosphate
  modified_base 4: mod_base = OTHER; note = 2'-O-methyluridine-3'-phosphate
  modified_base 5: mod_base = OTHER; note = 2'-O-methylguanosine-3'-phosphate
  modified_base 6: mod_base = OTHER; note = 2'-O-methylguanosine-3'-phosphate
  modified_base 7: mod_base = OTHER; note = 2'-fluorocytidine-3'-phosphate
  modified_base 8: mod_base = OTHER; note = 2'-O-methyladenosine-3'-phosphate
  modified_base 9: mod_base = OTHER; note = 2'-fluoroguanosine-3'-phosphate
  modified_base 10: mod_base = OTHER; note = 2'-fluoroadenosine-3'-phosphate
  modified_base 11: mod_base = OTHER; note = 2'-fluoroguanosine-3'-phosphate
  modified_base 12: mod_base = OTHER; note = 2'-O-methyladenosine-3'-phosphate
  modified_base 13: mod_base = OTHER; note = 2'-O-methylguanosine-3'-phosphate
  modified_base 14: mod_base = OTHER; note = 2'-O-methyluridine-3'-phosphate
  modified_base 15: mod_base = OTHER; note = 2'-O-methyladenosine-3'-phosphate
  modified_base 16: mod_base = OTHER; note = 2'-O-methyluridine-3'-phosphate
  modified_base 17: mod_base = OTHER; note = 2'-O-methyladenosine-3'-phosphate
  modified_base 18: mod_base = OTHER; note = 2'-O-methyladenosine-3'-phosphate
  modified_base 19: mod_base = OTHER; note = 2'-O-methyluridine-3'-phosphate
  modified_base 20: mod_base = OTHER; note = 2'-O-methylguanosine-3'-phosphate
  modified_base 21: mod_base = OTHER; note 2'-O-methyladenosine-3'-phosphate-N-[tris(GalNAc-alkyl)-ami dodecanoyl)]-4-hydroxyprolinol (Hyp-(GalNAc-alkyl)3)
atttggcagagagtataatga

SEQ ID NO: 3759 - RNA, 21 nt, synthetic construct
  source 1..21: mol_type = other RNA
  modified_base 1: mod_base = OTHER; note = 2'-O-methyluridine-3'-phosphorothioate
  modified_base 2: mod_base = OTHER; note = 2'-O-methyluridine-3'-phosphorothioate
  modified_base 3: mod_base = OTHER; note = 2'-O-methyluridine-3'-phosphate
  modified_base 4: mod_base = OTHER; note = 2'-O-methylguanosine-3'-phosphate
  modified_base 5: mod_base = OTHER; note = 2'-O-methylguanosine-3'-phosphate
  modified_base 6: mod_base = OTHER; note = 2'-O-methylcytidine-3'-phosphate
  modified_base 7: mod_base = OTHER; note = 2'-fluoroadenosine-3'-phosphate
  modified_base 8: mod_base = OTHER; note = 2'-O-methylguanosine-3'-phosphate
  modified_base 9: mod_base = OTHER; note = 2'-fluoroadenosine-3'-phosphate
  modified_base 10: mod_base = OTHER; note = 2'-fluoroguanosine-3'-phosphate
  modified_base 11: mod_base = OTHER; note = 2'-fluoroadenosine-3'-phosphate
  modified_base 12: mod_base = OTHER; note = 2'-O-methylguanosine-3'-phosphate
  modified_base 13: mod_base = OTHER; note = 2'-O-methyluridine-3'-phosphate
  modified_base 14: mod_base = OTHER; note = 2'-O-methyladenosine-3'-phosphate
  modified_base 15: mod_base = OTHER; note = 2'-O-methyluridine-3'-phosphate
  modified_base 16: mod_base = OTHER; note = 2'-O-methyladenosine-3'-phosphate
  modified_base 17: mod_base = OTHER; note = 2'-O-methyladenosine-3'-phosphate
  modified_base 18: mod_base = OTHER; note = 2'-O-methyluridine-3'-phosphate
  modified_base 19: mod_base = OTHER; note = 2'-O-methylguanosine-3'-phosphate
  modified_base 20: mod_base = OTHER; note = 2'-O-methyladenosine-3'-phosphate
  modified_base 21: mod_base = OTHER; note 2'-O-methyladenosine-3'-phosphate-N-[tris(GalNAc-alkyl)-ami dodecanoyl)]-4-hydroxyprolinol (Hyp-(GalNAc-alkyl)3)
tttggcagagagtataatgaa

SEQ ID NO: 3760 - RNA, 21 nt, synthetic construct
  source 1..21: mol_type = other RNA
  modified_base 1: mod_base = OTHER; note = 2'-O-methylcytidine-3'- phosphorothioate
  modified_base 2: mod_base = OTHER; note = 2'-O-methyluridine-3'-phosphorothioate
  modified_base 3: mod_base = OTHER; note = 2'-O-methyluridine-3'-phosphate
  modified_base 4: mod_base = OTHER; note = 2'-O-methylguanosine-3'-phosphate
  modified_base 5: mod_base = OTHER; note = 2'-O-methylcytidine-3'-phosphate
  modified_base 6: mod_base = OTHER; note = 2'-O-methyladenosine-3'-phosphate
  modified_base 7: mod_base = OTHER; note = 2'-fluorouridine-3'-phosphate
  modified_base 8: mod_base = OTHER; note = 2'-O-methyluridine-3'-phosphate
  modified_base 9: mod_base = OTHER; note = 2'-fluorouridine-3'-phosphate
  modified_base 10: mod_base = OTHER; note = 2'-fluorouridine-3'-phosphate
  modified_base 11: mod_base = OTHER; note = 2'-fluoroguanosine-3'-phosphate
  modified_base 12: mod_base = OTHER; note = 2'-O-methylguanosine-3'-phosphate
  modified_base 13: mod_base = OTHER; note = 2'-O-methylguanosine-3'-phosphate
  modified_base 14: mod_base = OTHER; note = 2'-O-methyladenosine-3'-phosphate
  modified_base 15: mod_base = OTHER; note = 2'-O-methylcytidine-3'-phosphate
  modified_base 16: mod_base = OTHER; note = 2'-O-methyladenosine-3'-phosphate
  modified_base 17: mod_base = OTHER; note = 2'-O-methylguanosine-3'-phosphate
  modified_base 18: mod_base = OTHER; note = 2'-O-methyladenosine-3'-phosphate
  modified_base 19: mod_base = OTHER; note = 2'-O-methyladenosine-3'-phosphate
  modified_base 20: mod_base = OTHER; note = 2'-O-methyluridine-3'-phosphate
  modified_base 21: mod_base = OTHER; note 2'-O-methyladenosine-3'-phosphate-N-[tris(GalNAc-alkyl)-ami dodecanoyl)]-4-hydroxyprolinol (Hyp-(GalNAc-alkyl)3)
cttgcattttgggacagaata

SEQ ID NO: 3761 - RNA, 21 nt, synthetic construct
  source 1..21: mol_type = other RNA
  modified_base 1: mod_base = OTHER; note = 2'-O-methyladenosine-3'- phosphorothioate
  modified_base 2: mod_base = OTHER; note = 2'-O-methyluridine-3'-phosphorothioate
  modified_base 3: mod_base = OTHER; note = 2'-O-methylguanosine-3'-phosphate
  modified_base 4: mod_base = OTHER; note = 2'-O-methylguanosine-3'-phosphate
  modified_base 5: mod_base = OTHER; note = 2'-O-methyladenosine-3'-phosphate
  modified_base 6: mod_base = OTHER; note = 2'-O-methyladenosine-3'-phosphate
  modified_base 7: mod_base = OTHER; note = 2'-fluorouridine-3'-phosphate
  modified_base 8: mod_base = OTHER; note = 2'-O-methylcytidine-3'-phosphate
  modified_base 9: mod_base = OTHER; note = 2'-fluorouridine-3'-phosphate
  modified_base 10: mod_base = OTHER; note = 2'-fluorocytidine-3'-phosphate
  modified_base 11: mod_base = OTHER; note = 2'-fluoroadenosine-3'-phosphate
  modified_base 12: mod_base = OTHER; note = 2'-O-methylguanosine-3'-phosphate
  modified_base 13: mod_base = OTHER; note = 2'-O-methyladenosine-3'-phosphate
  modified_base 14: mod_base = OTHER; note = 2'-O-methylcytidine-3'-phosphate
  modified_base 15: mod_base = OTHER; note = 2'-O-methylcytidine-3'-phosphate
  modified_base 16: mod_base = OTHER; note = 2'-O-methyluridine-3'-phosphate
  modified_base 17: mod_base = OTHER; note = 2'-O-methyluridine-3'-phosphate
  modified_base 18: mod_base = OTHER; note = 2'-O-methylguanosine-3'-phosphate
  modified_base 19: mod_base = OTHER; note = 2'-O-methyluridine-3'-phosphate
  modified_base 20: mod_base = OTHER; note = 2'-O-methylguanosine-3'-phosphate
  modified_base 21: mod_base = OTHER; note 2'-O-methyladenosine-3'-phosphate-N-[tris(GalNAc-alkyl)-ami dodecanoyl)]-4-hydroxyprolinol (Hyp-(GalNAc-alkyl)3)
atggaatctcagaccttgtga

SEQ ID NO: 3762 - RNA, 21 nt, synthetic construct
  source 1..21: mol_type = other RNA
  modified_base 1: mod_base = OTHER; note = 2'-O-methylcytidine-3'- phosphorothioate
  modified_base 2: mod_base = OTHER; note = 2'-O-methyladenosine-3'- phosphorothioate
  modified_base 3: mod_base = OTHER; note = 2'-O-methylcytidine-3'-phosphate
  modified_base 4: mod_base = OTHER; note = 2'-O-methyladenosine-3'-phosphate
  modified_base 5: mod_base = OTHER; note = 2'-O-methylguanosine-3'-phosphate
  modified_base 6: mod_base = OTHER; note = 2'-O-methylcytidine-3'-phosphate
  modified_base 7: mod_base = OTHER; note = 2'-fluorouridine-3'-phosphate
  modified_base 8: mod_base = OTHER; note = 2'-O-methyladenosine-3'-phosphate
  modified_base 9: mod_base = OTHER; note = 2'-fluorouridine-3'-phosphate
  modified_base 10: mod_base = OTHER; note = 2'-fluoroadenosine-3'-phosphate
  modified_base 11: mod_base = OTHER; note = 2'-fluorouridine-3'-phosphate
  modified_base 12: mod_base = OTHER; note = 2'-O-methylcytidine-3'-phosphate
  modified_base 13: mod_base = OTHER; note = 2'-O-methylcytidine-3'-phosphate
  modified_base 14: mod_base = OTHER; note = 2'-O-methyluridine-3'-phosphate
  modified_base 15: mod_base = OTHER; note = 2'-O-methylguanosine-3'-phosphate
  modified_base 16: mod_base = OTHER; note = 2'-O-methyladenosine-3'-phosphate
  modified_base 17: mod_base = OTHER; note = 2'-O-methyluridine-3'-phosphate
  modified_base 18: mod_base = OTHER; note = 2'-O-methylguanosine-3'-phosphate
  modified_base 19: mod_base = OTHER; note = 2'-O-methylcytidine-3'-phosphate
  modified_base 20: mod_base = OTHER; note = 2'-O-methyluridine-3'-phosphate
  modified_base 21: mod_base = OTHER; note 2'-O-methyladenosine-3'-phosphate-N-[tris(GalNAc-alkyl)-ami dodecanoyl)]-4-hydroxyprolinol (Hyp-(GalNAc-alkyl)3)
cacagctatatcctgatgcta

SEQ ID NO: 3763 - RNA, 21 nt, synthetic construct
  source 1..21: mol_type = other RNA
  modified_base 1: mod_base = OTHER; note = 2'-O-methylguanosine-3'- phosphorothioate
  modified_base 2: mod_base = OTHER; note = 2'-O-methyladenosine-3'- phosphorothioate
  modified_base 3: mod_base = OTHER; note = 2'-O-methylguanosine-3'-phosphate
  modified_base 4: mod_base = OTHER; note = 2'-O-methylguanosine-3'-phosphate
  modified_base 5: mod_base = OTHER; note = 2'-O-methyladenosine-3'-phosphate
  modified_base 6: mod_base = OTHER; note = 2'-O-methyladenosine-3'-phosphate
  modified_base 7: mod_base = OTHER; note = 2'-fluoroguanosine-3'-phosphate
  modified_base 8: mod_base = OTHER; note = 2'-O-methyladenosine-3'-phosphate
  modified_base 9: mod_base = OTHER; note = 2'-fluoroguanosine-3'-phosphate
  modified_base 10: mod_base = OTHER; note = 2'-fluoroguanosine-3'-phosphate
  modified_base 11: mod_base = OTHER; note = 2'-fluorocytidine-3'-phosphate
  modified_base 12: mod_base = OTHER; note = 2'-O-methylcytidine-3'-phosphate
  modified_base 13: mod_base = OTHER; note = 2'-O-methylcytidine-3'-phosphate
  modified_base 14: mod_base = OTHER; note = 2'-O-methylguanosine-3'-phosphate
  modified_base 15: mod_base = OTHER; note = 2'-O-methyluridine-3'-phosphate
  modified_base 16: mod_base = OTHER; note = 2'-O-methyluridine-3'-phosphate
  modified_base 17: mod_base = OTHER; note = 2'-O-methyluridine-3'-phosphate
  modified_base 18: mod_base = OTHER; note = 2'-O-methylguanosine-3'-phosphate
  modified_base 19: mod_base = OTHER; note = 2'-O-methyladenosine-3'-phosphate
  modified_base 20: mod_base = OTHER; note = 2'-O-methyladenosine-3'-phosphate
  modified_base 21: mod_base = OTHER; note 2'-O-methyladenosine-3'-phosphate-N-[tris(GalNAc-alkyl)-ami dodecanoyl)]-4-hydroxyprolinol (Hyp-(GalNAc-alkyl)3)
gaggaagaggcccgtttgaaa

SEQ ID NO: 3764 - RNA, 21 nt, synthetic construct
  source 1..21: mol_type = other RNA
  modified_base 1: mod_base = OTHER; note = 2'-O-methyluridine-3'-phosphorothioate
  modified_base 2: mod_base = OTHER; note = 2'-O-methylcytidine-3'- phosphorothioate
  modified_base 3: mod_base = OTHER; note = 2'-O-methyluridine-3'-phosphate
  modified_base 4: mod_base = OTHER; note = 2'-O-methylguanosine-3'-phosphate
  modified_base 5: mod_base = OTHER; note = 2'-O-methyladenosine-3'-phosphate
  modified_base 6: mod_base = OTHER; note = 2'-O-methylguanosine-3'-phosphate
  modified_base 7: mod_base = OTHER; note = 2'-fluoroguanosine-3'-phosphate
  modified_base 8: mod_base = OTHER; note = 2'-O-methyladenosine-3'-phosphate
  modified_base 9: mod_base = OTHER; note = 2'-fluoroadenosine-3'-phosphate
  modified_base 10: mod_base = OTHER; note = 2'-fluoroguanosine-3'-phosphate
  modified_base 11: mod_base = OTHER; note = 2'-fluoroadenosine-3'-phosphate
  modified_base 12: mod_base = OTHER; note = 2'-O-methylguanosine-3'-phosphate
  modified_base 13: mod_base = OTHER; note = 2'-O-methylguanosine-3'-phosphate
  modified_base 14: mod_base = OTHER; note = 2'-O-methylcytidine-3'-phosphate
  modified_base 15: mod_base = OTHER; note = 2'-O-methylcytidine-3'-phosphate
  modified_base 16: mod_base = OTHER; note = 2'-O-methylcytidine-3'-phosphate
  modified_base 17: mod_base = OTHER; note = 2'-O-methylguanosine-3'-phosphate
  modified_base 18: mod_base = OTHER; note = 2'-O-methyluridine-3'-phosphate
  modified_base 19: mod_base = OTHER; note = 2'-O-methyluridine-3'-phosphate
  modified_base 20: mod_base = OTHER; note = 2'-O-methyluridine-3'-phosphate
  modified_base 21: mod_base = OTHER; note 2'-O-methyladenosine-3'-phosphate-N-[tris(GalNAc-alkyl)-ami dodecanoyl)]-4-hydroxyprolinol (Hyp-(GalNAc-alkyl)3)
tctgaggaagaggcccgttta

SEQ ID NO: 3765 - RNA, 21 nt, synthetic construct
  source 1..21: mol_type = other RNA
  modified_base 1: mod_base = OTHER; note = 2'-O-methylcytidine-3'- phosphorothioate
  modified_base 2: mod_base = OTHER; note = 2'-O-methyladenosine-3'- phosphorothioate
  modified_base 3: mod_base = OTHER; note = 2'-O-methylcytidine-3'-phosphate
  modified_base 4: mod_base = OTHER; note = 2'-O-methyladenosine-3'-phosphate
  modified_base 5: mod_base = OTHER; note = 2'-O-methyluridine-3'-phosphate
  modified_base 6: mod_base = OTHER; note = 2'-O-methylcytidine-3'-phosphate
  modified_base 7: mod_base = OTHER; note = 2'-fluorocytidine-3'-phosphate
  modified_base 8: mod_base = OTHER; note = 2'-O-methyluridine-3'-phosphate
  modified_base 9: mod_base = OTHER; note = 2'-fluoroguanosine-3'-phosphate
  modified_base 10: mod_base = OTHER; note = 2'-fluoroguanosine-3'-phosphate
  modified_base 11: mod_base = OTHER; note = 2'-fluoroguanosine-3'-phosphate
  modified_base 12: mod_base = OTHER; note = 2'-O-methyladenosine-3'-phosphate
  modified_base 13: mod_base = OTHER; note = 2'-O-methyluridine-3'-phosphate
  modified_base 14: mod_base = OTHER; note = 2'-O-methylcytidine-3'-phosphate
  modified_base 15: mod_base = OTHER; note = 2'-O-methylcytidine-3'-phosphate
  modified_base 16: mod_base = OTHER; note = 2'-O-methyladenosine-3'-phosphate
  modified_base 17: mod_base = OTHER; note = 2'-O-methylguanosine-3'-phosphate
  modified_base 18: mod_base = OTHER; note = 2'-O-methyluridine-3'-phosphate
  modified_base 19: mod_base = OTHER; note = 2'-O-methylguanosine-3'-phosphate
  modified_base 20: mod_base = OTHER; note = 2'-O-methyluridine-3'-phosphate
  modified_base 21: mod_base = OTHER; note 2'-O-methyladenosine-3'-phosphate-N-[tris(GalNAc-alkyl)-ami dodecanoyl)]-4-hydroxyprolinol (Hyp-(GalNAc-alkyl)3)
cacatcctgggatccagtgta

SEQ ID NO: 3766 - RNA, 21 nt, synthetic construct
  source 1..21: mol_type = other RNA
  modified_base 1: mod_base = OTHER; note = 2'-O-methyladenosine-3'- phosphorothioate
  modified_base 2: mod_base = OTHER; note = 2'-O-methylguanosine-3'- phosphorothioate
  modified_base 3: mod_base = OTHER; note = 2'-O-methylcytidine-3'-phosphate
  modified_base 4: mod_base = OTHER; note = 2'-O-methylcytidine-3'-phosphate
  modified_base 5: mod_base = OTHER; note = 2'-O-methyluridine-3'-phosphate
  modified_base 6: mod_base = OTHER; note = 2'-O-methyluridine-3'-phosphate
  modified_base 7: mod_base = OTHER; note = 2'-fluorouridine-3'-phosphate
  modified_base 8: mod_base = OTHER; note = 2'-O-methyluridine-3'-phosphate
  modified_base 9: mod_base = OTHER; note = 2'-fluorocytidine-3'-phosphate
  modified_base 10: mod_base = OTHER; note = 2'-fluorocytidine-3'-phosphate
  modified_base 11: mod_base = OTHER; note = 2'-fluorouridine-3'-phosphate
  modified_base 12: mod_base = OTHER; note = 2'-O-methyluridine-3'-phosphate
  modified_base 13: mod_base = OTHER; note = 2'-O-methyladenosine-3'-phosphate
  modified_base 14: mod_base = OTHER; note = 2'-O-methylguanosine-3'-phosphate
  modified_base 15: mod_base = OTHER; note = 2'-O-methyladenosine-3'-phosphate
  modified_base 16: mod_base = OTHER; note = 2'-O-methyladenosine-3'-phosphate
  modified_base 17: mod_base = OTHER; note = 2'-O-methylcytidine-3'-phosphate
  modified_base 18: mod_base = OTHER; note = 2'-O-methyladenosine-3'-phosphate
  modified_base 19: mod_base = OTHER; note = 2'-O-methylcytidine-3'-phosphate
  modified_base 20: mod_base = OTHER; note = 2'-O-methylcytidine-3'-phosphate
  modified_base 21: mod_base = OTHER; note 2'-O-methyladenosine-3'-phosphate-N-[tris(GalNAc-alkyl)-ami dodecanoyl)]-4-hydroxyprolinol (Hyp-(GalNAc-alkyl)3)
agccttttccttagaacacca

SEQ ID NO: 3767 - RNA, 21 nt, synthetic construct
  source 1..21: mol_type = other RNA
  modified_base 1: mod_base = OTHER; note = 2'-O-methyluridine-3'-phosphorothioate
  modified_base 2: mod_base = OTHER; note = 2'-O-methylcytidine-3'- phosphorothioate
  modified_base 3: mod_base = OTHER; note = 2'-O-methyladenosine-3'-phosphate
  modified_base 4: mod_base = OTHER; note = 2'-O-methyladenosine-3'-phosphate
  modified_base 5: mod_base = OTHER; note = 2'-O-methylcytidine-3'-phosphate
  modified_base 6: mod_base = OTHER; note = 2'-O-methyluridine-3'-phosphate
  modified_base 7: mod_base = OTHER; note = 2'-fluoroguanosine-3'-phosphate
  modified_base 8: mod_base = OTHER; note = 2'-O-methylguanosine-3'-phosphate
  modified_base 9: mod_base = OTHER; note = 2'-fluorouridine-3'-phosphate
  modified_base 10: mod_base = OTHER; note = 2'-fluorouridine-3'-phosphate
  modified_base 11: mod_base = OTHER; note = 2'-fluoroadenosine-3'-phosphate
  modified_base 12: mod_base = OTHER; note = 2'-O-methylguanosine-3'-phosphate
  modified_base 13: mod_base = OTHER; note = 2'-O-methyluridine-3'-phosphate
  modified_base 14: mod_base = OTHER; note = 2'-O-methylguanosine-3'-phosphate
  modified_base 15: mod_base = OTHER; note = 2'-O-methyluridine-3'-phosphate
  modified_base 16: mod_base = OTHER; note = 2'-O-methylguanosine-3'-phosphate
  modified_base 17: mod_base = OTHER; note = 2'-O-methyladenosine-3'-phosphate
  modified_base 18: mod_base = OTHER; note = 2'-O-methyladenosine-3'-phosphate
  modified_base 19: mod_base = OTHER; note = 2'-O-methyladenosine-3'-phosphate
  modified_base 20: mod_base = OTHER; note = 2'-O-methyluridine-3'-phosphate
  modified_base 21: mod_base = OTHER; note 2'-O-methyladenosine-3'-phosphate-N-[tris(GalNAc-alkyl)-ami dodecanoyl)]-4-hydroxyprolinol (Hyp-(GalNAc-alkyl)3)
tcaactggttagtgtgaaata

SEQ ID NO: 3768 - RNA, 23 nt, synthetic construct
  source 1..23: mol_type = other RNA
  modified_base 1: mod_base = OTHER; note = 2'-O-methyluridine-3'-phosphorothioate
  modified_base 2: mod_base = OTHER; note = 2'-fluorouridine -3'-phosphorothioate
  modified_base 3: mod_base = OTHER; note = 2'-O-methyluridine-3'-phosphate
  modified_base 4: mod_base = OTHER; note = 2'-O-methyladenosine-3'-phosphate
  modified_base 5: mod_base = OTHER; note = 2'-O-methyladenosine-3'-phosphate
  modified_base 6: mod_base = OTHER; note = 2'-fluorouridine-3'-phosphate
  modified_base 7: mod_base = OTHER; note = 2'-O-methylcytidine-3'-phosphate
  modified_base 8: mod_base = OTHER; note = 2'-fluoroadenosine-3'-phosphate
  modified_base 9: mod_base = OTHER; note = 2'-fluorocytidine-3'-phosphate
  modified_base 10: mod_base = OTHER; note = 2'-O-methyladenosine-3'-phosphate
  modified_base 11: mod_base = OTHER; note = 2'-O-methylguanosine-3'-phosphate
  modified_base 12: mod_base = OTHER; note = 2'-O-methyladenosine-3'-phosphate
  modified_base 13: mod_base = OTHER; note = 2'-O-methyluridine-3'-phosphate
  modified_base 14: mod_base = OTHER; note = 2'-fluorocytidine-3'-phosphate
  modified_base 15: mod_base = OTHER; note = 2'-O-methyladenosine-3'-phosphate
  modified_base 16: mod_base = OTHER; note = 2'-fluoroguanosine-3'-phosphate
  modified_base 17: mod_base = OTHER; note = 2'-O-methyladenosine-3'-phosphate
  modified_base 18: mod_base = OTHER; note = 2'-O-methyluridine-3'-phosphate
  modified_base 19: mod_base = OTHER; note = 2'-O-methyladenosine-3'-phosphate
  modified_base 20: mod_base = OTHER; note = 2'-O-methyladenosine-3'-phosphate
  modified_base 21: mod_base = OTHER; note = 2'-O-methyladenosine-3'- phosphorothioate
  modified_base 22: mod_base = OTHER; note = 2'-O-methyladenosine-3'- phosphorothioate
  modified_base 23: mod_base = OTHER; note = 2'-O-methyladenosine-3'-phosphate
tttaatcacagatcagataaaaa

SEQ ID NO: 3769 - RNA, 23 nt, synthetic construct
  source 1..23: mol_type = other RNA
  modified_base 1: mod_base = OTHER; note = 2'-O-methyladenosine-3'- phosphorothioate
  modified_base 2: mod_base = OTHER; note = 2'-fluoroadenosine-3'-phosphorothioate
  modified_base 3: mod_base = OTHER; note = 2'-O-methylcytidine-3'-phosphate
  modified_base 4: mod_base = OTHER; note = 2'-O-methyluridine-3'-phosphate
  modified_base 5: mod_base = OTHER; note = 2'-O-methyladenosine-3'-phosphate
  modified_base 6: mod_base = OTHER; note = 2'-fluorouridine-3'-phosphate
  modified_base 7: mod_base = OTHER; note = 2'-O-methyluridine-3'-phosphate
  modified_base 8: mod_base = OTHER; note = 2'-fluorouridine-3'-phosphate
  modified_base 9: mod_base = OTHER; note = 2'-fluorocytidine-3'-phosphate
  modified_base 10: mod_base = OTHER; note = 2'-O-methyladenosine-3'-phosphate
  modified_base 11: mod_base = OTHER; note = 2'-O-methylcytidine-3'-phosphate
  modified_base 12: mod_base = OTHER; note = 2'-O-methyladenosine-3'-phosphate
  modified_base 13: mod_base = OTHER; note = 2'-O-methylcytidine-3'-phosphate
  modified_base 14: mod_base = OTHER; note = 2'-fluorouridine-3'-phosphate
  modified_base 15: mod_base = OTHER; note = 2'-O-methyladenosine-3'-phosphate
  modified_base 16: mod_base = OTHER; note = 2'-fluoroadenosine-3'-phosphate
  modified_base 17: mod_base = OTHER; note = 2'-O-methylcytidine-3'-phosphate
  modified_base 18: mod_base = OTHER; note = 2'-O-methylcytidine-3'-phosphate
  modified_base 19: mod_base = OTHER; note = 2'-O-methyladenosine-3'-phosphate
  modified_base 20: mod_base = OTHER; note = 2'-O-methylguanosine-3'-phosphate
  modified_base 21: mod_base = OTHER; note = 2'-O-methyluridine-3'-phosphorothioate
  modified_base 22: mod_base = OTHER; note = 2'-O-methyluridine-3'-phosphorothioate
  modified_base 23: mod_base = OTHER; note = 2'-O-methylguanosine-3'-phosphate
aactatttcacactaaccagttg

SEQ ID NO: 3770 - RNA, 23 nt, synthetic construct
  source 1..23: mol_type = other RNA
  modified_base 1: mod_base = OTHER; note = 2'-O-methyladenosine-3'- phosphorothioate
  modified_base 2: mod_base = OTHER; note = 2'-fluoroadenosine-3'-phosphorothioate
  modified_base 3: mod_base = OTHER; note = 2'-O-methyladenosine-3'-phosphate
  modified_base 4: mod_base = OTHER; note = 2'-O-methyluridine-3'-phosphate
  modified_base 5: mod_base = OTHER; note = 2'-O-methylguanosine-3'-phosphate
  modified_base 6: mod_base = OTHER; note = 2'-fluorouridine-3'-phosphate
  modified_base 7: mod_base = OTHER; note = 2'-O-methyluridine-3'-phosphate
  modified_base 8: mod_base = OTHER; note = 2'-fluoroguanosine-3'-phosphate
  modified_base 9: mod_base = OTHER; note = 2'-fluoroguanosine-3'-phosphate
  modified_base 10: mod_base = OTHER; note = 2'-O-methyladenosine-3'-phosphate
  modified_base 11: mod_base = OTHER; note = 2'-O-methylcytidine-3'-phosphate
  modified_base 12: mod_base = OTHER; note = 2'-O-methyluridine-3'-phosphate
  modified_base 13: mod_base = OTHER; note = 2'-O-methyladenosine-3'-phosphate
  modified_base 14: mod_base = OTHER; note = 2'-fluoroguanosine-3'-phosphate
  modified_base 15: mod_base = OTHER; note = 2'-O-methylguanosine-3'-phosphate
  modified_base 16: mod_base = OTHER; note = 2'-fluorocytidine-3'-phosphate
  modified_base 17: mod_base = OTHER; note = 2'-O-methyladenosine-3'-phosphate
  modified_base 18: mod_base = OTHER; note = 2'-O-methyluridine-3'-phosphate
  modified_base 19: mod_base = OTHER; note = 2'-O-methylguanosine-3'-phosphate
  modified_base 20: mod_base = OTHER; note = 2'-O-methyluridine-3'-phosphate
  modified_base 21: mod_base = OTHER; note = 2'-O-methyluridine-3'-phosphorothioate
  modified_base 22: mod_base = OTHER; note = 2'-O-methylcytidine-3'- phosphorothioate
  modified_base 23: mod_base = OTHER; note = 2'-O-methyladenosine-3'-phosphate
aaatgttggactaggcatgttca

SEQ ID NO: 3771 - RNA, 23 nt, synthetic construct
  source 1..23: mol_type = other RNA
  modified_base 1: mod_base = OTHER; note = 2'-O-methyladenosine-3'- phosphorothioate
  modified_base 2: mod_base = OTHER; note = 2'-fluoroguanosine-3'-phosphorothioate
  modified_base 3: mod_base = OTHER; note = 2'-O-methyladenosine-3'-phosphate
  modified_base 4: mod_base = OTHER; note = 2'-O-methylguanosine-3'-phosphate
  modified_base 5: mod_base = OTHER; note = 2'-O-methyluridine-3'-phosphate
  modified_base 6: mod_base = OTHER; note = 2'-fluorouridine-3'-phosphate
  modified_base 7: mod_base = OTHER; note = 2'-O-methylguanosine-3'-phosphate
  modified_base 8: mod_base = OTHER; note = 2'-fluorocytidine-3'-phosphate
  modified_base 9: mod_base = OTHER; note = 2'-fluorocytidine-3'-phosphate
  modified_base 10: mod_base = OTHER; note = 2'-O-methyladenosine-3'-phosphate
  modified_base 11: mod_base = OTHER; note = 2'-O-methyluridine-3'-phosphate
  modified_base 12: mod_base = OTHER; note = 2'-O-methyladenosine-3'-phosphate
  modified_base 13: mod_base = OTHER; note = 2'-O-methyluridine-3'-phosphate
  modified_base 14: mod_base = OTHER; note = 2'-fluorouridine-3'-phosphate
  modified_base 15: mod_base = OTHER; note = 2'-O-methylguanosine-3'-phosphate
  modified_base 16: mod_base = OTHER; note = 2'-fluoroguanosine-3'-phosphate
  modified_base 17: mod_base = OTHER; note = 2'-O-methyladenosine-3'-phosphate
  modified_base 18: mod_base = OTHER; note = 2'-O-methylcytidine-3'-phosphate
  modified_base 19: mod_base = OTHER; note = 2'-O-methyluridine-3'-phosphate
  modified_base 20: mod_base = OTHER; note = 2'-O-methyluridine-3'-phosphate
  modified_base 21: mod_base = OTHER; note = 2'-O-methylguanosine-3'- phosphorothioate
  modified_base 22: mod_base = OTHER; note = 2'-O-methylguanosine-3'- phosphorothioate
  modified_base 23: mod_base = OTHER; note = 2'-O-methyladenosine-3'-phosphate
agagttgccatattggacttgga

SEQ ID NO: 3772 - RNA, 23 nt, synthetic construct
  source 1..23: mol_type = other RNA
  modified_base 1: mod_base = OTHER; note = 2'-O-methyladenosine-3'- phosphorothioate
  modified_base 2: mod_base = OTHER; note = 2'-fluoroadenosine-3'-phosphorothioate
  modified_base 3: mod_base = OTHER; note = 2'-O-methylguanosine-3'-phosphate
  modified_base 4: mod_base = OTHER; note = 2'-O-methyladenosine-3'-phosphate
  modified_base 5: mod_base = OTHER; note = 2'-O-methylcytidine-3'-phosphate
  modified_base 6: mod_base = OTHER; note = 2'-fluorocytidine-3'-phosphate
  modified_base 7: mod_base = OTHER; note = 2'-O-methylcytidine-3'-phosphate
  modified_base 8: mod_base = OTHER; note = 2'-fluorouridine-3'-phosphate
  modified_base 9: mod_base = OTHER; note = 2'-fluorouridine-3'-phosphate
  modified_base 10: mod_base = OTHER; note = 2'-O-methyladenosine-3'-phosphate
  modified_base 11: mod_base = OTHER; note = 2'-O-methyladenosine-3'-phosphate
  modified_base 12: mod_base = OTHER; note = 2'-O-methyluridine-3'-phosphate
  modified_base 13: mod_base = OTHER; note = 2'-O-methylcytidine-3'-phosphate
  modified_base 14: mod_base = OTHER; note = 2'-fluoroadenosine-3'-phosphate
  modified_base 15: mod_base = OTHER; note = 2'-O-methyluridine-3'-phosphate
  modified_base 16: mod_base = OTHER; note = 2'-fluoroguanosine-3'-phosphate
  modified_base 17: mod_base = OTHER; note = 2'-O-methylguanosine-3'-phosphate
  modified_base 18: mod_base = OTHER; note = 2'-O-methyluridine-3'-phosphate
  modified_base 19: mod_base = OTHER; note = 2'-O-methylguanosine-3'-phosphate
  modified_base 20: mod_base = OTHER; note = 2'-O-methylguanosine-3'-phosphate
  modified_base 21: mod_base = OTHER; note = 2'-O-methyladenosine-3'- phosphorothioate
  modified_base 22: mod_base = OTHER; note = 2'-O-methyladenosine-3'- phosphorothioate
  modified_base 23: mod_base = OTHER; note = 2'-O-methyladenosine-3'-phosphate
aagacccttaatcatggtggaaa

SEQ ID NO: 3773 - RNA, 23 nt, synthetic construct
  source 1..23: mol_type = other RNA
  modified_base 1: mod_base = OTHER; note = 2'-O-methyluridine-3'-phosphorothioate
  modified_base 2: mod_base = OTHER; note = 2'-fluorouridine -3'-phosphorothioate
  modified_base 3: mod_base = OTHER; note = 2'-O-methyladenosine-3'-phosphate
  modified_base 4: mod_base = OTHER; note = 2'-O-methylguanosine-3'-phosphate
  modified_base 5: mod_base = OTHER; note = 2'-O-methylcytidine-3'-phosphate
  modified_base 6: mod_base = OTHER; note = 2'-fluorocytidine-3'-phosphate
  modified_base 7: mod_base = OTHER; note = 2'-O-methyluridine-3'-phosphate
  modified_base 8: mod_base = OTHER; note = 2'-fluoroadenosine-3'-phosphate
  modified_base 9: mod_base = OTHER; note = 2'-fluoroguanosine-3'-phosphate
  modified_base 10: mod_base = OTHER; note = 2'-O-methyladenosine-3'-phosphate
  modified_base 11: mod_base = OTHER; note = 2'-O-methylcytidine-3'-phosphate
  modified_base 12: mod_base = OTHER; note = 2'-O-methyladenosine-3'-phosphate
  modified_base 13: mod_base = OTHER; note = 2'-O-methylguanosine-3'-phosphate
  modified_base 14: mod_base = OTHER; note = 2'-fluorouridine-3'-phosphate
  modified_base 15: mod_base = OTHER; note = 2'-O-methylguanosine-3'-phosphate
  modified_base 16: mod_base = OTHER; note = 2'-fluoroadenosine-3'-phosphate
  modified_base 17: mod_base = OTHER; note = 2'-O-methyladenosine-3'-phosphate
  modified_base 18: mod_base = OTHER; note = 2'-O-methyladenosine-3'-phosphate
  modified_base 19: mod_base = OTHER; note = 2'-O-methyluridine-3'-phosphate
  modified_base 20: mod_base = OTHER; note = 2'-O-methylguanosine-3'-phosphate
  modified_base 21: mod_base = OTHER; note = 2'-O-methyladenosine-3'- phosphorothioate
  modified_base 22: mod_base = OTHER; note = 2'-O-methyluridine-3'-phosphorothioate
  modified_base 23: mod_base = OTHER; note = 2'-O-methyladenosine-3'-phosphate
ttagcctagacagtgaaatgata

SEQ ID NO: 3774 - RNA, 23 nt, synthetic construct
  source 1..23: mol_type = other RNA
  modified_base 1: mod_base = OTHER; note = 2'-O-methyladenosine-3'- phosphorothioate
  modified_base 2: mod_base = OTHER; note = 2'-fluorocytidine-3'-phosphorothioate
  modified_base 3: mod_base = OTHER; note = 2'-O-methyladenosine-3'-phosphate
  modified_base 4: mod_base = OTHER; note = 2'-O-methylguanosine-3'-phosphate
  modified_base 5: mod_base = OTHER; note = 2'-O-methyladenosine-3'-phosphate
  modified_base 6: mod_base = OTHER; note = 2'-fluorouridine-3'-phosphate
  modified_base 7: mod_base = OTHER; note = 2'-O-methylcytidine-3'-phosphate
  modified_base 8: mod_base = OTHER; note = 2'-fluoroadenosine-3'-phosphate
  modified_base 9: mod_base = OTHER; note = 2'-fluoroguanosine-3'-phosphate
  modified_base 10: mod_base = OTHER; note = 2'-O-methyladenosine-3'-phosphate
  modified_base 11: mod_base = OTHER; note = 2'-O-methyluridine-3'-phosphate
  modified_base 12: mod_base = OTHER; note = 2'-O-methyladenosine-3'-phosphate
  modified_base 13: mod_base = OTHER; note = 2'-O-methyladenosine-3'-phosphate
  modified_base 14: mod_base = OTHER; note = 2'-fluoroadenosine-3'-phosphate
  modified_base 15: mod_base = OTHER; note = 2'-O-methyladenosine-3'-phosphate
  modified_base 16: mod_base = OTHER; note = 2'-fluoroadenosine-3'-phosphate
  modified_base 17: mod_base = OTHER; note = 2'-O-methylguanosine-3'-phosphate
  modified_base 18: mod_base = OTHER; note = 2'-O-methylguanosine-3'-phosphate
  modified_base 19: mod_base = OTHER; note = 2'-O-methyladenosine-3'-phosphate
  modified_base 20: mod_base = OTHER; note = 2'-O-methylcytidine-3'-phosphate
  modified_base 21: mod_base = OTHER; note = 2'-O-methyladenosine-3'- phosphorothioate
  modified_base 22: mod_base = OTHER; note = 2'-O-methyladenosine-3'- phosphorothioate
  modified_base 23: mod_base = OTHER; note = 2'-O-methylcytidine-3'-phosphate
acagatcagataaaaaggacaac

SEQ ID NO: 3775 - RNA, 23 nt, synthetic construct
  source 1..23: mol_type = other RNA
  modified_base 1: mod_base = OTHER; note = 2'-O-methyluridine-3'-phosphorothioate
  modified_base 2: mod_base = OTHER; note = 2'-fluoroadenosine-3'-phosphorothioate
  modified_base 3: mod_base = OTHER; note = 2'-O-methyluridine-3'-phosphate
  modified_base 4: mod_base = OTHER; note = 2'-O-methyladenosine-3'-phosphate
  modified_base 5: mod_base = OTHER; note = 2'-O-methyluridine-3'-phosphate
  modified_base 6: mod_base = OTHER; note = 2'-fluorouridine-3'-phosphate
  modified_base 7: mod_base = OTHER; note = 2'-O-methylguanosine-3'-phosphate
  modified_base 8: mod_base = OTHER; note = 2'-fluoroguanosine-3'-phosphate
  modified_base 9: mod_base = OTHER; note = 2'-fluoroadenosine-3'-phosphate
  modified_base 10: mod_base = OTHER; note = 2'-O-methyluridine-3'-phosphate
  modified_base 11: mod_base = OTHER; note = 2'-O-methyluridine-3'-phosphate
  modified_base 12: mod_base = OTHER; note = 2'-O-methyluridine-3'-phosphate
  modified_base 13: mod_base = OTHER; note = 2'-O-methyladenosine-3'-phosphate
  modified_base 14: mod_base = OTHER; note = 2'-fluorouridine-3'-phosphate
  modified_base 15: mod_base = OTHER; note = 2'-O-methyladenosine-3'-phosphate
  modified_base 16: mod_base = OTHER; note = 2'-fluorocytidine-3'-phosphate
  modified_base 17: mod_base = OTHER; note = 2'-O-methyladenosine-3'-phosphate
  modified_base 18: mod_base = OTHER; note = 2'-O-methylcytidine-3'-phosphate
  modified_base 19: mod_base = OTHER; note = 2'-O-methyluridine-3'-phosphate
  modified_base 20: mod_base = OTHER; note = 2'-O-methylguanosine-3'-phosphate
  modified_base 21: mod_base = OTHER; note = 2'-O-methylguanosine-3'- phosphorothioate
  modified_base 22: mod_base = OTHER; note = 2'-O-methyladenosine-3'- phosphorothioate
  modified_base 23: mod_base = OTHER; note = 2'-O-methyluridine-3'-phosphate
tatattggatttatacactggat

SEQ ID NO: 3776 - RNA, 23 nt, synthetic construct
  source 1..23: mol_type = other RNA
  modified_base 1: mod_base = OTHER; note = 2'-O-methyluridine-3'-phosphorothioate
  modified_base 2: mod_base = OTHER; note = 2'-fluorouridine -3'-phosphorothioate
  modified_base 3: mod_base = OTHER; note = 2'-O-methyladenosine-3'-phosphate
  modified_base 4: mod_base = OTHER; note = 2'-O-methylguanosine-3'-phosphate
  modified_base 5: mod_base = OTHER; note = 2'-O-methyluridine-3'-phosphate
  modified_base 6: mod_base = OTHER; note = 2'-fluorouridine-3'-phosphate
  modified_base 7: mod_base = OTHER; note = 2'-O-methylguanosine-3'-phosphate
  modified_base 8: mod_base = OTHER; note = 2'-fluoroguanosine-3'-phosphate
  modified_base 9: mod_base = OTHER; note = 2'-fluorouridine-3'-phosphate
  modified_base 10: mod_base = OTHER; note = 2'-O-methyladenosine-3'-phosphate
  modified_base 11: mod_base = OTHER; note = 2'-O-methyluridine-3'-phosphate
  modified_base 12: mod_base = OTHER; note = 2'-O-methyladenosine-3'-phosphate
  modified_base 13: mod_base = OTHER; note = 2'-O-methyladenosine-3'-phosphate
  modified_base 14: mod_base = OTHER; note = 2'-fluorocytidine-3'-phosphate
  modified_base 15: mod_base = OTHER; note = 2'-O-methyladenosine-3'-phosphate
  modified_base 16: mod_base = OTHER; note = 2'-fluorocytidine-3'-phosphate
  modified_base 17: mod_base = OTHER; note = 2'-O-methyluridine-3'-phosphate
  modified_base 18: mod_base = OTHER; note = 2'-O-methyluridine-3'-phosphate
  modified_base 19: mod_base = OTHER; note = 2'-O-methylguanosine-3'-phosphate
  modified_base 20: mod_base = OTHER; note = 2'-O-methylguanosine-3'-phosphate
  modified_base 21: mod_base = OTHER; note = 2'-O-methyladenosine-3'- phosphorothioate
  modified_base 22: mod_base = OTHER; note = 2'-O-methyluridine-3'-phosphorothioate
  modified_base 23: mod_base = OTHER; note = 2'-O-methyladenosine-3'-phosphate
ttagttggtataacacttggata

SEQ ID NO: 3777 - RNA, 23 nt, synthetic construct
  source 1..23: mol_type = other RNA
  modified_base 1: mod_base = OTHER; note = 2'-O-methyluridine-3'-phosphorothioate
  modified_base 2: mod_base = OTHER; note = 2'-fluorouridine -3'-phosphorothioate
  modified_base 3: mod_base = OTHER; note = 2'-O-methyluridine-3'-phosphate
  modified_base 4: mod_base = OTHER; note = 2'-O-methylcytidine-3'-phosphate
  modified_base 5: mod_base = OTHER; note = 2'-O-methyladenosine-3'-phosphate
  modified_base 6: mod_base = OTHER; note = 2'-fluoroadenosine-3'-phosphate
  modified_base 7: mod_base = OTHER; note = 2'-O-methyluridine-3'-phosphate
  modified_base 8: mod_base = OTHER; note = 2'-fluorouridine-3'-phosphate
  modified_base 9: mod_base = OTHER; note = 2'-fluorouridine-3'-phosphate
  modified_base 10: mod_base = OTHER; note = 2'-O-methylguanosine-3'-phosphate
  modified_base 11: mod_base = OTHER; note = 2'-O-methyluridine-3'-phosphate
  modified_base 12: mod_base = OTHER; note = 2'-O-methylcytidine-3'-phosphate
  modified_base 13: mod_base = OTHER; note = 2'-O-methyluridine-3'-phosphate
  modified_base 14: mod_base = OTHER; note = 2'-fluorouridine-3'-phosphate
  modified_base 15: mod_base = OTHER; note = 2'-O-methylcytidine-3'-phosphate
  modified_base 16: mod_base = OTHER; note = 2'-fluoroguanosine-3'-phosphate
  modified_base 17: mod_base = OTHER; note = 2'-O-methyladenosine-3'-phosphate
  modified_base 18: mod_base = OTHER; note = 2'-O-methyluridine-3'-phosphate
  modified_base 19: mod_base = OTHER; note = 2'-O-methylguanosine-3'-phosphate
  modified_base 20: mod_base = OTHER; note = 2'-O-methyladenosine-3'-phosphate
  modified_base 21: mod_base = OTHER; note = 2'-O-methylcytidine-3'- phosphorothioate
  modified_base 22: mod_base = OTHER; note = 2'-O-methyladenosine-3'- phosphorothioate
  modified_base 23: mod_base = OTHER; note = 2'-O-methyluridine-3'-phosphate
tttcaatttgtcttcgatgacat

SEQ ID NO: 3778 - RNA, 23 nt, synthetic construct
  source 1..23: mol_type = other RNA
  modified_base 1: mod_base = OTHER; note = 2'-O-methyluridine-3'-phosphorothioate
  modified_base 2: mod_base = OTHER; note = 2'-fluoroadenosine-3'-phosphorothioate
  modified_base 3: mod_base = OTHER; note = 2'-O-methylguanosine-3'-phosphate
  modified_base 4: mod_base = OTHER; note = 2'-O-methyladenosine-3'-phosphate
  modified_base 5: mod_base = OTHER; note = 2'-O-methylguanosine-3'-phosphate
  modified_base 6: mod_base = OTHER; note = 2'-fluoroadenosine-3'-phosphate
  modified_base 7: mod_base = OTHER; note = 2'-O-methylcytidine-3'-phosphate
  modified_base 8: mod_base = OTHER; note = 2'-fluoroadenosine-3'-phosphate
  modified_base 9: mod_base = OTHER; note = 2'-fluoroadenosine-3'-phosphate
  modified_base 10: mod_base = OTHER; note = 2'-O-methyluridine-3'-phosphate
  modified_base 11: mod_base = OTHER; note = 2'-O-methylcytidine-3'-phosphate
  modified_base 12: mod_base = OTHER; note = 2'-O-methyluridine-3'-phosphate
  modified_base 13: mod_base = OTHER; note = 2'-O-methyluridine-3'-phosphate
  modified_base 14: mod_base = OTHER; note = 2'-fluorouridine-3'-phosphate
  modified_base 15: mod_base = OTHER; note = 2'-O-methylguanosine-3'-phosphate
  modified_base 16: mod_base = OTHER; note = 2'-fluoroguanosine-3'-phosphate
  modified_base 17: mod_base = OTHER; note = 2'-O-methyluridine-3'-phosphate
  modified_base 18: mod_base = OTHER; note = 2'-O-methylguanosine-3'-phosphate
  modified_base 19: mod_base = OTHER; note = 2'-O-methyluridine-3'-phosphate
  modified_base 20: mod_base = OTHER; note = 2'-O-methyluridine-3'-phosphate
  modified_base 21: mod_base = OTHER; note = 2'-O-methylcytidine-3'- phosphorothioate
  modified_base 22: mod_base = OTHER; note = 2'-O-methyluridine-3'-phosphorothioate
  modified_base 23: mod_base = OTHER; note = 2'-O-methyladenosine-3'-phosphate
tagagacaatctttggtgttcta

SEQ ID NO: 3779 - RNA, 23 nt, synthetic construct
  source 1..23: mol_type = other RNA
  modified_base 1: mod_base = OTHER; note = 2'-O-methyluridine-3'-phosphorothioate
  modified_base 2: mod_base = OTHER; note = 2'-fluorocytidine-3'-phosphorothioate
  modified_base 3: mod_base = OTHER; note = 2'-O-methyladenosine-3'-phosphate
  modified_base 4: mod_base = OTHER; note = 2'-O-methylguanosine-3'-phosphate
  modified_base 5: mod_base = OTHER; note = 2'-O-methyladenosine-3'-phosphate
  modified_base 6: mod_base = OTHER; note = 2'-fluoroguanosine-3'-phosphate
  modified_base 7: mod_base = OTHER; note = 2'-O-methyladenosine-3'-phosphate
  modified_base 8: mod_base = OTHER; note = 2'-fluorocytidine-3'-phosphate
  modified_base 9: mod_base = OTHER; note = 2'-fluoroadenosine-3'-phosphate
  modified_base 10: mod_base = OTHER; note = 2'-O-methyladenosine-3'-phosphate
  modified_base 11: mod_base = OTHER; note = 2'-O-methyluridine-3'-phosphate
  modified_base 12: mod_base = OTHER; note = 2'-O-methylcytidine-3'-phosphate
  modified_base 13: mod_base = OTHER; note = 2'-O-methyluridine-3'-phosphate
  modified_base 14: mod_base = OTHER; note = 2'-fluorouridine-3'-phosphate
  modified_base 15: mod_base = OTHER; note = 2'-O-methyluridine-3'-phosphate
  modified_base 16: mod_base = OTHER; note = 2'-fluoroguanosine-3'-phosphate
  modified_base 17: mod_base = OTHER; note = 2'-O-methylguanosine-3'-phosphate
  modified_base 18: mod_base = OTHER; note = 2'-O-methyluridine-3'-phosphate
  modified_base 19: mod_base = OTHER; note = 2'-O-methylguanosine-3'-phosphate
  modified_base 20: mod_base = OTHER; note = 2'-O-methyluridine-3'-phosphate
  modified_base 21: mod_base = OTHER; note = 2'-O-methyluridine-3'-phosphorothioate
  modified_base 22: mod_base = OTHER; note = 2'-O-methylcytidine-3'- phosphorothioate
  modified_base 23: mod_base = OTHER; note = 2'-O-methyluridine-3'-phosphate
tcagagacaatctttggtgttct

SEQ ID NO: 3780 - RNA, 23 nt, synthetic construct
  source 1..23: mol_type = other RNA
  modified_base 1: mod_base = OTHER; note = 2'-O-methyladenosine-3'- phosphorothioate
  modified_base 2: mod_base = OTHER; note = 2'-fluorouridine -3'-phosphorothioate
  modified_base 3: mod_base = OTHER; note = 2'-O-methylcytidine-3'-phosphate
  modified_base 4: mod_base = OTHER; note = 2'-O-methyladenosine-3'-phosphate
  modified_base 5: mod_base = OTHER; note = 2'-O-methylguanosine-3'-phosphate
  modified_base 6: mod_base = OTHER; note = 2'-fluoroadenosine-3'-phosphate
  modified_base 7: mod_base = OTHER; note = 2'-O-methyluridine-3'-phosphate
  modified_base 8: mod_base = OTHER; note = 2'-fluoroadenosine-3'-phosphate
  modified_base 9: mod_base = OTHER; note = 2'-fluoroadenosine-3'-phosphate
  modified_base 10: mod_base = OTHER; note = 2'-O-methyladenosine-3'-phosphate
  modified_base 11: mod_base = OTHER; note = 2'-O-methyladenosine-3'-phosphate
  modified_base 12: mod_base = OTHER; note = 2'-O-methyladenosine-3'-phosphate
  modified_base 13: mod_base = OTHER; note = 2'-O-methylguanosine-3'-phosphate
  modified_base 14: mod_base = OTHER; note = 2'-fluoroguanosine-3'-phosphate
  modified_base 15: mod_base = OTHER; note = 2'-O-methyladenosine-3'-phosphate
  modified_base 16: mod_base = OTHER; note = 2'-fluorocytidine-3'-phosphate
  modified_base 17: mod_base = OTHER; note = 2'-O-methyladenosine-3'-phosphate
  modified_base 18: mod_base = OTHER; note = 2'-O-methyladenosine-3'-phosphate
  modified_base 19: mod_base = OTHER; note = 2'-O-methylcytidine-3'-phosphate
  modified_base 20: mod_base = OTHER; note = 2'-O-methyladenosine-3'-phosphate
  modified_base 21: mod_base = OTHER; note = 2'-O-methyluridine-3'-phosphorothioate
  modified_base 22: mod_base = OTHER; note = 2'-O-methylguanosine-3'- phosphorothioate
  modified_base 23: mod_base = OTHER; note = 2'-O-methylcytidine-3'-phosphate
atcagataaaaaggacaacatgc

SEQ ID NO: 3781 - RNA, 23 nt, synthetic construct
  source 1..23: mol_type = other RNA
  modified_base 1: mod_base = OTHER; note = 2'-O-methyladenosine-3'- phosphorothioate
  modified_base 2: mod_base = OTHER; note = 2'-fluorouridine -3'-phosphorothioate
  modified_base 3: mod_base = OTHER; note = 2'-O-methyluridine-3'-phosphate
  modified_base 4: mod_base = OTHER; note = 2'-O-methyluridine-3'-phosphate
  modified_base 5: mod_base = OTHER; note = 2'-O-methylcytidine-3'-phosphate
  modified_base 6: mod_base = OTHER; note = 2'-fluorouridine-3'-phosphate
  modified_base 7: mod_base = OTHER; note = 2'-O-methyladenosine-3'-phosphate
  modified_base 8: mod_base = OTHER; note = 2'-fluoroadenosine-3'-phosphate
  modified_base 9: mod_base = OTHER; note = 2'-fluorocytidine-3'-phosphate
  modified_base 10: mod_base = OTHER; note = 2'-O-methyluridine-3'-phosphate
  modified_base 11: mod_base = OTHER; note = 2'-O-methyluridine-3'-phosphate
  modified_base 12: mod_base = OTHER; note = 2'-O-methylcytidine-3'-phosphate
  modified_base 13: mod_base = OTHER; note = 2'-O-methyladenosine-3'-phosphate
  modified_base 14: mod_base = OTHER; note = 2'-fluoroguanosine-3'-phosphate
  modified_base 15: mod_base = OTHER; note = 2'-O-methylguanosine-3'-phosphate
  modified_base 16: mod_base = OTHER; note = 2'-fluoroadenosine-3'-phosphate
  modified_base 17: mod_base = OTHER; note = 2'-O-methylguanosine-3'-phosphate
  modified_base 18: mod_base = OTHER; note = 2'-O-methyluridine-3'-phosphate
  modified_base 19: mod_base = OTHER; note = 2'-O-methyluridine-3'-phosphate
  modified_base 20: mod_base = OTHER; note = 2'-O-methylguanosine-3'-phosphate
  modified_base 21: mod_base = OTHER; note = 2'-O-methyladenosine-3'- phosphorothioate
  modified_base 22: mod_base = OTHER; note = 2'-O-methyluridine-3'-phosphorothioate
  modified_base 23: mod_base = OTHER; note = 2'-O-methylguanosine-3'-phosphate
atttctaacttcaggagttgatg

SEQ ID NO: 3782 - RNA, 23 nt, synthetic construct
  source 1..23: mol_type = other RNA
  modified_base 1: mod_base = OTHER; note = 2'-O-methyluridine-3'-phosphorothioate
  modified_base 2: mod_base = OTHER; note = 2'-fluoroguanosine-3'-phosphorothioate
  modified_base 3: mod_base = OTHER; note = 2'-O-methylguanosine-3'-phosphate
  modified_base 4: mod_base = OTHER; note = 2'-O-methyluridine-3'-phosphate
  modified_base 5: mod_base = OTHER; note = 2'-O-methyladenosine-3'-phosphate
  modified_base 6: mod_base = OTHER; note = 2'-fluorouridine-3'-phosphate
  modified_base 7: mod_base = OTHER; note = 2'-O-methyladenosine-3'-phosphate
  modified_base 8: mod_base = OTHER; note = 2'-fluoroadenosine-3'-phosphate
  modified_base 9: mod_base = OTHER; note = 2'-fluorocytidine-3'-phosphate
  modified_base 10: mod_base = OTHER; note = 2'-O-methyladenosine-3'-phosphate
  modified_base 11: mod_base = OTHER; note = 2'-O-methylcytidine-3'-phosphate
  modified_base 12: mod_base = OTHER; note = 2'-O-methyluridine-3'-phosphate
  modified_base 13: mod_base = OTHER; note = 2'-O-methyluridine-3'-phosphate
  modified_base 14: mod_base = OTHER; note = 2'-fluoroguanosine-3'-phosphate
  modified_base 15: mod_base = OTHER; note = 2'-O-methylguanosine-3'-phosphate
  modified_base 16: mod_base = OTHER; note = 2'-fluoroadenosine-3'-phosphate
  modified_base 17: mod_base = OTHER; note = 2'-O-methyluridine-3'-phosphate
  modified_base 18: mod_base = OTHER; note = 2'-O-methyladenosine-3'-phosphate
  modified_base 19: mod_base = OTHER; note = 2'-O-methylguanosine-3'-phosphate
  modified_base 20: mod_base = OTHER; note = 2'-O-methyluridine-3'-phosphate
  modified_base 21: mod_base = OTHER; note = 2'-O-methyluridine-3'-phosphorothioate
  modified_base 22: mod_base = OTHER; note = 2'-O-methylguanosine-3'- phosphorothioate
  modified_base 23: mod_base = OTHER; note = 2'-O-methylguanosine-3'-phosphate
tggtataacacttggatagttgg

SEQ ID NO: 3783 - RNA, 23 nt, synthetic construct
  source 1..23: mol_type = other RNA
  modified_base 1: mod_base = OTHER; note = 2'-O-methyluridine-3'-phosphorothioate
  modified_base 2: mod_base = OTHER; note = 2'-fluoroadenosine-3'-phosphorothioate
  modified_base 3: mod_base = OTHER; note = 2'-O-methyladenosine-3'-phosphate
  modified_base 4: mod_base = OTHER; note = 2'-O-methyluridine-3'-phosphate
  modified_base 5: mod_base = OTHER; note = 2'-O-methylcytidine-3'-phosphate
  modified_base 6: mod_base = OTHER; note = 2'-fluorouridine-3'-phosphate
  modified_base 7: mod_base = OTHER; note = 2'-O-methyluridine-3'-phosphate
  modified_base 8: mod_base = OTHER; note = 2'-fluorouridine-3'-phosphate
  modified_base 9: mod_base = OTHER; note = 2'-fluoroguanosine-3'-phosphate
  modified_base 10: mod_base = OTHER; note = 2'-O-methylguanosine-3'-phosphate
  modified_base 11: mod_base = OTHER; note = 2'-O-methyluridine-3'-phosphate
  modified_base 12: mod_base = OTHER; note = 2'-O-methylguanosine-3'-phosphate
  modified_base 13: mod_base = OTHER; note = 2'-O-methyluridine-3'-phosphate
  modified_base 14: mod_base = OTHER; note = 2'-fluorouridine-3'-phosphate
  modified_base 15: mod_base = OTHER; note = 2'-O-methylcytidine-3'-phosphate
  modified_base 16: mod_base = OTHER; note = 2'-fluorouridine-3'-phosphate
  modified_base 17: mod_base = OTHER; note = 2'-O-methyladenosine-3'-phosphate
  modified_base 18: mod_base = OTHER; note = 2'-O-methyladenosine-3'-phosphate
  modified_base 19: mod_base = OTHER; note = 2'-O-methylguanosine-3'-phosphate
  modified_base 20: mod_base = OTHER; note = 2'-O-methylguanosine-3'-phosphate
  modified_base 21: mod_base = OTHER; note = 2'-O-methyladenosine-3'- phosphorothioate
  modified_base 22: mod_base = OTHER; note = 2'-O-methyladenosine-3'- phosphorothioate
  modified_base 23: mod_base = OTHER; note = 2'-O-methyladenosine-3'-phosphate
taatctttggtgttctaaggaaa

SEQ ID NO: 3784 - RNA, 23 nt, synthetic construct
  source 1..23: mol_type = other RNA
  modified_base 1: mod_base = OTHER; note = 2'-O-methyladenosine-3'- phosphorothioate
  modified_base 2: mod_base = OTHER; note = 2'-fluoroguanosine-3'-phosphorothioate
  modified_base 3: mod_base = OTHER; note = 2'-O-methyladenosine-3'-phosphate
  modified_base 4: mod_base = OTHER; note = 2'-O-methylcytidine-3'-phosphate
  modified_base 5: mod_base = OTHER; note = 2'-O-methyluridine-3'-phosphate
  modified_base 6: mod_base = OTHER; note = 2'-fluoroadenosine-3'-phosphate
  modified_base 7: mod_base = OTHER; note = 2'-O-methylcytidine-3'-phosphate
  modified_base 8: mod_base = OTHER; note = 2'-fluoroadenosine-3'-phosphate
  modified_base 9: mod_base = OTHER; note = 2'-fluorocytidine-3'-phosphate
  modified_base 10: mod_base = OTHER; note = 2'-O-methyladenosine-3'-phosphate
  modified_base 11: mod_base = OTHER; note = 2'-O-methyladenosine-3'-phosphate
  modified_base 12: mod_base = OTHER; note = 2'-O-methylguanosine-3'-phosphate
  modified_base 13: mod_base = OTHER; note = 2'-O-methyladenosine-3'-phosphate
  modified_base 14: mod_base = OTHER; note = 2'-fluorouridine-3'-phosphate
  modified_base 15: mod_base = OTHER; note = 2'-O-methyluridine-3'-phosphate
  modified_base 16: mod_base = OTHER; note = 2'-fluoroadenosine-3'-phosphate
  modified_base 17: mod_base = OTHER; note = 2'-O-methyladenosine-3'-phosphate
  modified_base 18: mod_base = OTHER; note = 2'-O-methyluridine-3'-phosphate
  modified_base 19: mod_base = OTHER; note = 2'-O-methyladenosine-3'-phosphate
  modified_base 20: mod_base = OTHER; note = 2'-O-methylcytidine-3'-phosphate
  modified_base 21: mod_base = OTHER; note = 2'-O-methylcytidine-3'- phosphorothioate
  modified_base 22: mod_base = OTHER; note = 2'-O-methyladenosine-3'- phosphorothioate
  modified_base 23: mod_base = OTHER; note = 2'-O-methyluridine-3'-phosphate
agactacacaagattaataccat

SEQ ID NO: 3785 - RNA, 23 nt, synthetic construct
  source 1..23: mol_type = other RNA
  modified_base 1: mod_base = OTHER; note = 2'-O-methyluridine-3'-phosphorothioate
  modified_base 2: mod_base = OTHER; note = 2'-fluoroguanosine-3'-phosphorothioate
  modified_base 3: mod_base = OTHER; note = 2'-O-methylcytidine-3'-phosphate
  modified_base 4: mod_base = OTHER; note = 2'-O-methyladenosine-3'-phosphate
  modified_base 5: mod_base = OTHER; note = 2'-O-methyluridine-3'-phosphate
  modified_base 6: mod_base = OTHER; note = 2'-fluoroguanosine-3'-phosphate
  modified_base 7: mod_base = OTHER; note = 2'-O-methyluridine-3'-phosphate
  modified_base 8: mod_base = OTHER; note = 2'-fluorouridine-3'-phosphate
  modified_base 9: mod_base = OTHER; note = 2'-fluorocytidine-3'-phosphate
  modified_base 10: mod_base = OTHER; note = 2'-O-methyladenosine-3'-phosphate
  modified_base 11: mod_base = OTHER; note = 2'-O-methylguanosine-3'-phosphate
  modified_base 12: mod_base = OTHER; note = 2'-O-methyluridine-3'-phosphate
  modified_base 13: mod_base = OTHER; note = 2'-O-methylguanosine-3'-phosphate
  modified_base 14: mod_base = OTHER; note = 2'-fluoroadenosine-3'-phosphate
  modified_base 15: mod_base = OTHER; note = 2'-O-methyladenosine-3'-phosphate
  modified_base 16: mod_base = OTHER; note = 2'-fluoroguanosine-3'-phosphate
  modified_base 17: mod_base = OTHER; note = 2'-O-methylguanosine-3'-phosphate
  modified_base 18: mod_base = OTHER; note = 2'-O-methyladenosine-3'-phosphate
  modified_base 19: mod_base = OTHER; note = 2'-O-methylguanosine-3'-phosphate
  modified_base 20: mod_base = OTHER; note = 2'-O-methylcytidine-3'-phosphate
  modified_base 21: mod_base = OTHER; note = 2'-O-methylcytidine-3'- phosphorothioate
  modified_base 22: mod_base = OTHER; note = 2'-O-methyladenosine-3'- phosphorothioate
  modified_base 23: mod_base = OTHER; note = 2'-O-methylguanosine-3'-phosphate
tgcatgttcagtgaaggagccag

SEQ ID NO: 3786 - RNA, 23 nt, synthetic construct
  source 1..23: mol_type = other RNA
  modified_base 1: mod_base = OTHER; note = 2'-O-methyluridine-3'-phosphorothioate
  modified_base 2: mod_base = OTHER; note = 2'-fluoroguanosine-3'-phosphorothioate
  modified_base 3: mod_base = OTHER; note = 2'-O-methylguanosine-3'-phosphate
  modified_base 4: mod_base = OTHER; note = 2'-O-methyluridine-3'-phosphate
  modified_base 5: mod_base = OTHER; note = 2'-O-methyladenosine-3'-phosphate
  modified_base 6: mod_base = OTHER; note = 2'-fluoroadenosine-3'-phosphate
  modified_base 7: mod_base = OTHER; note = 2'-O-methyluridine-3'-phosphate
  modified_base 8: mod_base = OTHER; note = 2'-fluoroguanosine-3'-phosphate
  modified_base 9: mod_base = OTHER; note = 2'-fluorouridine-3'-phosphate
  modified_base 10: mod_base = OTHER; note = 2'-O-methyladenosine-3'-phosphate
  modified_base 11: mod_base = OTHER; note = 2'-O-methylcytidine-3'-phosphate
  modified_base 12: mod_base = OTHER; note = 2'-O-methyladenosine-3'-phosphate
  modified_base 13: mod_base = OTHER; note = 2'-O-methylcytidine-3'-phosphate
  modified_base 14: mod_base = OTHER; note = 2'-fluorouridine-3'-phosphate
  modified_base 15: mod_base = OTHER; note = 2'-O-methyladenosine-3'-phosphate
  modified_base 16: mod_base = OTHER; note = 2'-fluorocytidine-3'-phosphate
  modified_base 17: mod_base = OTHER; note = 2'-O-methyluridine-3'-phosphate
  modified_base 18: mod_base = OTHER; note = 2'-O-methylguanosine-3'-phosphate
  modified_base 19: mod_base = OTHER; note = 2'-O-methyladenosine-3'-phosphate
  modified_base 20: mod_base = OTHER; note = 2'-O-methyluridine-3'-phosphate
  modified_base 21: mod_base = OTHER; note = 2'-O-methyladenosine-3'- phosphorothioate
  modified_base 22: mod_base = OTHER; note = 2'-O-methyluridine-3'-phosphorothioate
  modified_base 23: mod_base = OTHER; note = 2'-O-methyladenosine-3'-phosphate
tggtaatgtacactactgatata

SEQ ID NO: 3787 - RNA, 23 nt, synthetic construct
  source 1..23: mol_type = other RNA
  modified_base 1: mod_base = OTHER; note = 2'-O-methyluridine-3'-phosphorothioate
  modified_base 2: mod_base = OTHER; note = 2'-fluoroguanosine-3'-phosphorothioate
  modified_base 3: mod_base = OTHER; note = 2'-O-methyluridine-3'-phosphate
  modified_base 4: mod_base = OTHER; note = 2'-O-methylguanosine-3'-phosphate
  modified_base 5: mod_base = OTHER; note = 2'-O-methyluridine-3'-phosphate
  modified_base 6: mod_base = OTHER; note = 2'-fluorouridine-3'-phosphate
  modified_base 7: mod_base = OTHER; note = 2'-O-methylcytidine-3'-phosphate
  modified_base 8: mod_base = OTHER; note = 2'-fluorouridine-3'-phosphate
  modified_base 9: mod_base = OTHER; note = 2'-fluoroadenosine-3'-phosphate
  modified_base 10: mod_base = OTHER; note = 2'-O-methyladenosine-3'-phosphate
  modified_base 11: mod_base = OTHER; note = 2'-O-methylguanosine-3'-phosphate
  modified_base 12: mod_base = OTHER; note = 2'-O-methylguanosine-3'-phosphate
  modified_base 13: mod_base = OTHER; note = 2'-O-methyladenosine-3'-phosphate
  modified_base 14: mod_base = OTHER; note = 2'-fluoroadenosine-3'-phosphate
  modified_base 15: mod_base = OTHER; note = 2'-O-methyladenosine-3'-phosphate
  modified_base 16: mod_base = OTHER; note = 2'-fluoroadenosine-3'-phosphate
  modified_base 17: mod_base = OTHER; note = 2'-O-methylguanosine-3'-phosphate
  modified_base 18: mod_base = OTHER; note = 2'-O-methylguanosine-3'-phosphate
  modified_base 19: mod_base = OTHER; note = 2'-O-methylcytidine-3'-phosphate
  modified_base 20: mod_base = OTHER; note = 2'-O-methyluridine-3'-phosphate
  modified_base 21: mod_base = OTHER; note = 2'-O-methylguanosine-3'- phosphorothioate
  modified_base 22: mod_base = OTHER; note = 2'-O-methylcytidine-3'- phosphorothioate
  modified_base 23: mod_base = OTHER; note = 2'-O-methylcytidine-3'-phosphate
tgtgttctaaggaaaaggctgcc

SEQ ID NO: 3788 - RNA, 23 nt, synthetic construct
  source 1..23: mol_type = other RNA
  modified_base 1: mod_base = OTHER; note = 2'-O-methyluridine-3'-phosphorothioate
  modified_base 2: mod_base = OTHER; note = 2'-fluoroadenosine-3'-phosphorothioate
  modified_base 3: mod_base = OTHER; note = 2'-O-methyladenosine-3'-phosphate
  modified_base 4: mod_base = OTHER; note = 2'-O-methylcytidine-3'-phosphate
  modified_base 5: mod_base = OTHER; note = 2'-O-methyluridine-3'-phosphate
  modified_base 6: mod_base = OTHER; note = 2'-fluoroadenosine-3'-phosphate
  modified_base 7: mod_base = OTHER; note = 2'-O-methyluridine-3'-phosphate
  modified_base 8: mod_base = OTHER; note = 2'-fluorouridine-3'-phosphate
  modified_base 9: mod_base = OTHER; note = 2'-fluorouridine-3'-phosphate
  modified_base 10: mod_base = OTHER; note = 2'-O-methylcytidine-3'-phosphate
  modified_base 11: mod_base = OTHER; note = 2'-O-methyladenosine-3'-phosphate
  modified_base 12: mod_base = OTHER; note = 2'-O-methylcytidine-3'-phosphate
  modified_base 13: mod_base = OTHER; note = 2'-O-methyladenosine-3'-phosphate
  modified_base 14: mod_base = OTHER; note = 2'-fluorocytidine-3'-phosphate
  modified_base 15: mod_base = OTHER; note = 2'-O-methyluridine-3'-phosphate
  modified_base 16: mod_base = OTHER; note = 2'-fluoroadenosine-3'-phosphate
  modified_base 17: mod_base = OTHER; note = 2'-O-methyladenosine-3'-phosphate
  modified_base 18: mod_base = OTHER; note = 2'-O-methylcytidine-3'-phosphate
  modified_base 19: mod_base = OTHER; note = 2'-O-methylcytidine-3'-phosphate
  modified_base 20: mod_base = OTHER; note = 2'-O-methyladenosine-3'-phosphate
  modified_base 21: mod_base = OTHER; note = 2'-O-methylguanosine-3'- phosphorothioate
  modified_base 22: mod_base = OTHER; note = 2'-O-methyluridine-3'-phosphorothioate
  modified_base 23: mod_base = OTHER; note = 2'-O-methyluridine-3'-phosphate
taactatttcacactaaccagtt

SEQ ID NO: 3789 - RNA, 23 nt, synthetic construct
  source 1..23: mol_type = other RNA
  modified_base 1: mod_base = OTHER; note = 2'-O-methyladenosine-3'- phosphorothioate
  modified_base 2: mod_base = OTHER; note = 2'-fluoroadenosine-3'-phosphorothioate
  modified_base 3: mod_base = OTHER; note = 2'-O-methyluridine-3'-phosphate
  modified_base 4: mod_base = OTHER; note = 2'-O-methylguanosine-3'-phosphate
  modified_base 5: mod_base = OTHER; note = 2'-O-methyluridine-3'-phosphate
  modified_base 6: mod_base = OTHER; note = 2'-fluoroadenosine-3'-phosphate
  modified_base 7: mod_base = OTHER; note = 2'-O-methylcytidine-3'-phosphate
  modified_base 8: mod_base = OTHER; note = 2'-fluoroadenosine-3'-phosphate
  modified_base 9: mod_base = OTHER; note = 2'-fluorocytidine-3'-phosphate
  modified_base 10: mod_base = OTHER; note = 2'-O-methyluridine-3'-phosphate
  modified_base 11: mod_base = OTHER; note = 2'-O-methyladenosine-3'-phosphate
  modified_base 12: mod_base = OTHER; note = 2'-O-methylcytidine-3'-phosphate
  modified_base 13: mod_base = OTHER; note = 2'-O-methyluridine-3'-phosphate
  modified_base 14: mod_base = OTHER; note = 2'-fluoroguanosine-3'-phosphate
  modified_base 15: mod_base = OTHER; note = 2'-O-methyladenosine-3'-phosphate
  modified_base 16: mod_base = OTHER; note = 2'-fluorouridine-3'-phosphate
  modified_base 17: mod_base = OTHER; note = 2'-O-methyladenosine-3'-phosphate
  modified_base 18: mod_base = OTHER; note = 2'-O-methyluridine-3'-phosphate
  modified_base 19: mod_base = OTHER; note = 2'-O-methyladenosine-3'-phosphate
  modified_base 20: mod_base = OTHER; note = 2'-O-methylguanosine-3'-phosphate
  modified_base 21: mod_base = OTHER; note = 2'-O-methyluridine-3'-phosphorothioate
  modified_base 22: mod_base = OTHER; note = 2'-O-methyluridine-3'-phosphorothioate
  modified_base 23: mod_base = OTHER; note = 2'-O-methylcytidine-3'-phosphate
aatgtacactactgatatagttc

SEQ ID NO: 3790 - RNA, 23 nt, synthetic construct
  source 1..23: mol_type = other RNA
  modified_base 1: mod_base = OTHER; note = 2'-O-methyluridine-3'-phosphorothioate
  modified_base 2: mod_base = OTHER; note = 2'-fluorouridine -3'-phosphorothioate
  modified_base 3: mod_base = OTHER; note = 2'-O-methyladenosine-3'-phosphate
  modified_base 4: mod_base = OTHER; note = 2'-O-methyladenosine-3'-phosphate
  modified_base 5: mod_base = OTHER; note = 2'-O-methyluridine-3'-phosphate
  modified_base 6: mod_base = OTHER; note = 2'-fluoroguanosine-3'-phosphate
  modified_base 7: mod_base = OTHER; note = 2'-O-methyluridine-3'-phosphate
  modified_base 8: mod_base = OTHER; note = 2'-fluoroadenosine-3'-phosphate
  modified_base 9: mod_base = OTHER; note = 2'-fluorocytidine-3'-phosphate
  modified_base 10: mod_base = OTHER; note = 2'-O-methyladenosine-3'-phosphate
  modified_base 11: mod_base = OTHER; note = 2'-O-methylcytidine-3'-phosphate
  modified_base 12: mod_base = OTHER; note = 2'-O-methyluridine-3'-phosphate
  modified_base 13: mod_base = OTHER; note = 2'-O-methyladenosine-3'-phosphate
  modified_base 14: mod_base = OTHER; note = 2'-fluorocytidine-3'-phosphate
  modified_base 15: mod_base = OTHER; note = 2'-O-methyluridine-3'-phosphate
  modified_base 16: mod_base = OTHER; note = 2'-fluoroguanosine-3'-phosphate
  modified_base 17: mod_base = OTHER; note = 2'-O-methyladenosine-3'-phosphate
  modified_base 18: mod_base = OTHER; note = 2'-O-methyluridine-3'-phosphate
  modified_base 19: mod_base = OTHER; note = 2'-O-methyladenosine-3'-phosphate
  modified_base 20: mod_base = OTHER; note = 2'-O-methyluridine-3'-phosphate
  modified_base 21: mod_base = OTHER; note = 2'-O-methyladenosine-3'- phosphorothioate
  modified_base 22: mod_base = OTHER; note = 2'-O-methylguanosine-3'- phosphorothioate
  modified_base 23: mod_base = OTHER; note = 2'-O-methyluridine-3'-phosphate
ttaatgtacactactgatatagt

SEQ ID NO: 3791 - RNA, 23 nt, synthetic construct
  source 1..23: mol_type = other RNA
  modified_base 1: mod_base = OTHER; note = 2'-O-methyluridine-3'-phosphorothioate
  modified_base 2: mod_base = OTHER; note = 2'-fluoroadenosine-3'-phosphorothioate
  modified_base 3: mod_base = OTHER; note = 2'-O-methylguanosine-3'-phosphate
  modified_base 4: mod_base = OTHER; note = 2'-O-methyluridine-3'-phosphate
  modified_base 5: mod_base = OTHER; note = 2'-O-methylcytidine-3'-phosphate
  modified_base 6: mod_base = OTHER; note = 2'-fluorocytidine-3'-phosphate
  modified_base 7: mod_base = OTHER; note = 2'-O-methyladenosine-3'-phosphate
  modified_base 8: mod_base = OTHER; note = 2'-fluorouridine-3'-phosphate
  modified_base 9: mod_base = OTHER; note = 2'-fluorocytidine-3'-phosphate
  modified_base 10: mod_base = OTHER; note = 2'-O-methyluridine-3'-phosphate
  modified_base 11: mod_base = OTHER; note = 2'-O-methyluridine-3'-phosphate
  modified_base 12: mod_base = OTHER; note = 2'-O-methyladenosine-3'-phosphate
  modified_base 13: mod_base = OTHER; note = 2'-O-methyladenosine-3'-phosphate
  modified_base 14: mod_base = OTHER; note = 2'-fluoroadenosine-3'-phosphate
  modified_base 15: mod_base = OTHER; note = 2'-O-methyladenosine-3'-phosphate
  modified_base 16: mod_base = OTHER; note = 2'-fluorouridine-3'-phosphate
  modified_base 17: mod_base = OTHER; note = 2'-O-methyladenosine-3'-phosphate
  modified_base 18: mod_base = OTHER; note = 2'-O-methyluridine-3'-phosphate
  modified_base 19: mod_base = OTHER; note = 2'-O-methyluridine-3'-phosphate
  modified_base 20: mod_base = OTHER; note = 2'-O-methyladenosine-3'-phosphate
  modified_base 21: mod_base = OTHER; note = 2'-O-methylcytidine-3'- phosphorothioate
  modified_base 22: mod_base = OTHER; note = 2'-O-methyluridine-3'-phosphorothioate
  modified_base 23: mod_base = OTHER; note = 2'-O-methylguanosine-3'-phosphate
tagtccatcttaaaatattactg

SEQ ID NO: 3792 - RNA, 23 nt, synthetic construct
  source 1..23: mol_type = other RNA
  modified_base 1: mod_base = OTHER; note = 2'-O-methyluridine-3'-phosphorothioate
  modified_base 2: mod_base = OTHER; note = 2'-fluorouridine -3'-phosphorothioate
  modified_base 3: mod_base = OTHER; note = 2'-O-methyluridine-3'-phosphate
  modified_base 4: mod_base = OTHER; note = 2'-O-methyluridine-3'-phosphate
  modified_base 5: mod_base = OTHER; note = 2'-O-methylcytidine-3'-phosphate
  modified_base 6: mod_base = OTHER; note = 2'-fluorocytidine-3'-phosphate
  modified_base 7: mod_base = OTHER; note = 2'-O-methylcytidine-3'-phosphate
  modified_base 8: mod_base = OTHER; note = 2'-fluoroadenosine-3'-phosphate
  modified_base 9: mod_base = OTHER; note = 2'-fluoroguanosine-3'-phosphate
  modified_base 10: mod_base = OTHER; note = 2'-O-methyluridine-3'-phosphate
  modified_base 11: mod_base = OTHER; note = 2'-O-methylcytidine-3'-phosphate
  modified_base 12: mod_base = OTHER; note = 2'-O-methylcytidine-3'-phosphate
  modified_base 13: mod_base = OTHER; note = 2'-O-methyladenosine-3'-phosphate
  modified_base 14: mod_base = OTHER; note = 2'-fluorouridine-3'-phosphate
  modified_base 15: mod_base = OTHER; note = 2'-O-methylcytidine-3'-phosphate
  modified_base 16: mod_base = OTHER; note = 2'-fluorouridine-3'-phosphate
  modified_base 17: mod_base = OTHER; note = 2'-O-methyluridine-3'-phosphate
  modified_base 18: mod_base = OTHER; note = 2'-O-methyladenosine-3'-phosphate
  modified_base 19: mod_base = OTHER; note = 2'-O-methyladenosine-3'-phosphate
  modified_base 20: mod_base = OTHER; note = 2'-O-methyladenosine-3'-phosphate
  modified_base 21: mod_base = OTHER; note = 2'-O-methyladenosine-3'- phosphorothioate
  modified_base 22: mod_base = OTHER; note = 2'-O-methyluridine-3'-phosphorothioate
  modified_base 23: mod_base = OTHER; note = 2'-O-methyladenosine-3'-phosphate
ttttcccagtccatcttaaaata

SEQ ID NO: 3793 - RNA, 23 nt, synthetic construct
  source 1..23: mol_type = other RNA
  modified_base 1: mod_base = OTHER; note = 2'-O-methyladenosine-3'- phosphorothioate
  modified_base 2: mod_base = OTHER; note = 2'-fluoroguanosine-3'-phosphorothioate
  modified_base 3: mod_base = OTHER; note = 2'-O-methyladenosine-3'-phosphate
  modified_base 4: mod_base = OTHER; note = 2'-O-methyladenosine-3'-phosphate
  modified_base 5: mod_base = OTHER; note = 2'-O-methylcytidine-3'-phosphate
  modified_base 6: mod_base = OTHER; note = 2'-fluorouridine-3'-phosphate
  modified_base 7: mod_base = OTHER; note = 2'-O-methyladenosine-3'-phosphate
  modified_base 8: mod_base = OTHER; note = 2'-fluorouridine-3'-phosphate
  modified_base 9: mod_base = OTHER; note = 2'-fluorouridine-3'-phosphate
  modified_base 10: mod_base = OTHER; note = 2'-O-methyluridine-3'-phosphate
  modified_base 11: mod_base = OTHER; note = 2'-O-methylcytidine-3'-phosphate
  modified_base 12: mod_base = OTHER; note = 2'-O-methyladenosine-3'-phosphate
  modified_base 13: mod_base = OTHER; note = 2'-O-methylcytidine-3'-phosphate
  modified_base 14: mod_base = OTHER; note = 2'-fluoroadenosine-3'-phosphate
  modified_base 15: mod_base = OTHER; note = 2'-O-methylcytidine-3'-phosphate
  modified_base 16: mod_base = OTHER; note = 2'-fluorouridine-3'-phosphate
  modified_base 17: mod_base = OTHER; note = 2'-O-methyladenosine-3'-phosphate
  modified_base 18: mod_base = OTHER; note = 2'-O-methyladenosine-3'-phosphate
  modified_base 19: mod_base = OTHER; note = 2'-O-methylcytidine-3'-phosphate
  modified_base 20: mod_base = OTHER; note = 2'-O-methylcytidine-3'-phosphate
  modified_base 21: mod_base = OTHER; note = 2'-O-methyladenosine-3'- phosphorothioate
  modified_base 22: mod_base = OTHER; note = 2'-O-methylguanosine-3'- phosphorothioate
  modified_base 23: mod_base = OTHER; note = 2'-O-methyluridine-3'-phosphate
agaactatttcacactaaccagt

SEQ ID NO: 3794 - RNA, 23 nt, synthetic construct
  source 1..23: mol_type = other RNA
  modified_base 1: mod_base = OTHER; note = 2'-O-methyluridine-3'-phosphorothioate
  modified_base 2: mod_base = OTHER; note = 2'-fluoroguanosine-3'-phosphorothioate
  modified_base 3: mod_base = OTHER; note = 2'-O-methyladenosine-3'-phosphate
  modified_base 4: mod_base = OTHER; note = 2'-O-methylcytidine-3'-phosphate
  modified_base 5: mod_base = OTHER; note = 2'-O-methyluridine-3'-phosphate
  modified_base 6: mod_base = OTHER; note = 2'-fluoroadenosine-3'-phosphate
  modified_base 7: mod_base = OTHER; note = 2'-O-methylguanosine-3'-phosphate
  modified_base 8: mod_base = OTHER; note = 2'-fluoroguanosine-3'-phosphate
  modified_base 9: mod_base = OTHER; note = 2'-fluorocytidine-3'-phosphate
  modified_base 10: mod_base = OTHER; note = 2'-O-methyladenosine-3'-phosphate
  modified_base 11: mod_base = OTHER; note = 2'-O-methyluridine-3'-phosphate
  modified_base 12: mod_base = OTHER; note = 2'-O-methylguanosine-3'-phosphate
  modified_base 13: mod_base = OTHER; note = 2'-O-methyluridine-3'-phosphate
  modified_base 14: mod_base = OTHER; note = 2'-fluorouridine-3'-phosphate
  modified_base 15: mod_base = OTHER; note = 2'-O-methylcytidine-3'-phosphate
  modified_base 16: mod_base = OTHER; note = 2'-fluoroadenosine-3'-phosphate
  modified_base 17: mod_base = OTHER; note = 2'-O-methylguanosine-3'-phosphate
  modified_base 18: mod_base = OTHER; note = 2'-O-methyluridine-3'-phosphate
  modified_base 19: mod_base = OTHER; note = 2'-O-methylguanosine-3'-phosphate
  modified_base 20: mod_base = OTHER; note = 2'-O-methyladenosine-3'-phosphate
  modified_base 21: mod_base = OTHER; note = 2'-O-methyladenosine-3'- phosphorothioate
  modified_base 22: mod_base = OTHER; note = 2'-O-methylguanosine-3'- phosphorothioate
  modified_base 23: mod_base = OTHER; note = 2'-O-methylguanosine-3'-phosphate
tgactaggcatgttcagtgaagg

SEQ ID NO: 3795 - RNA, 23 nt, synthetic construct
  source 1..23: mol_type = other RNA
  modified_base 1: mod_base = OTHER; note = 2'-O-methyluridine-3'-phosphorothioate
  modified_base 2: mod_base = OTHER; note = 2'-fluoroadenosine-3'-phosphorothioate
  modified_base 3: mod_base = OTHER; note = 2'-O-methyluridine-3'-phosphate
  modified_base 4: mod_base = OTHER; note = 2'-O-methyladenosine-3'-phosphate
  modified_base 5: mod_base = OTHER; note = 2'-O-methyladenosine-3'-phosphate
  modified_base 6: mod_base = OTHER; note = 2'-fluorocytidine-3'-phosphate
  modified_base 7: mod_base = OTHER; note = 2'-O-methyladenosine-3'-phosphate
  modified_base 8: mod_base = OTHER; note = 2'-fluorocytidine-3'-phosphate
  modified_base 9: mod_base = OTHER; note = 2'-fluorouridine-3'-phosphate
  modified_base 10: mod_base = OTHER; note = 2'-O-methyluridine-3'-phosphate
  modified_base 11: mod_base = OTHER; note = 2'-O-methylguanosine-3'-phosphate
  modified_base 12: mod_base = OTHER; note = 2'-O-methylguanosine-3'-phosphate
  modified_base 13: mod_base = OTHER; note = 2'-O-methyladenosine-3'-phosphate
  modified_base 14: mod_base = OTHER; note = 2'-fluorouridine-3'-phosphate
  modified_base 15: mod_base = OTHER; note = 2'-O-methyladenosine-3'-phosphate
  modified_base 16: mod_base = OTHER; note = 2'-fluoroguanosine-3'-phosphate
  modified_base 17: mod_base = OTHER; note = 2'-O-methyluridine-3'-phosphate
  modified_base 18: mod_base = OTHER; note = 2'-O-methyluridine-3'-phosphate
  modified_base 19: mod_base = OTHER; note = 2'-O-methylguanosine-3'-phosphate
  modified_base 20: mod_base = OTHER; note = 2'-O-methylguanosine-3'-phosphate
  modified_base 21: mod_base = OTHER; note = 2'-O-methyluridine-3'-phosphorothioate
  modified_base 22: mod_base = OTHER; note = 2'-O-methyluridine-3'-phosphorothioate
  modified_base 23: mod_base = OTHER; note = 2'-O-methylguanosine-3'-phosphate
tataacacttggatagttggttg

SEQ ID NO: 3796 - RNA, 23 nt, synthetic construct
  source 1..23: mol_type = other RNA
  modified_base 1: mod_base = OTHER; note = 2'-O-methyluridine-3'-phosphorothioate
  modified_base 2: mod_base = OTHER; note = 2'-fluorouridine -3'-phosphorothioate
  modified_base 3: mod_base = OTHER; note = 2'-O-methyluridine-3'-phosphate
  modified_base 4: mod_base = OTHER; note = 2'-O-methyladenosine-3'-phosphate
  modified_base 5: mod_base = OTHER; note = 2'-O-methylguanosine-3'-phosphate
  modified_base 6: mod_base = OTHER; note = 2'-fluorouridine-3'-phosphate
  modified_base 7: mod_base = OTHER; note = 2'-O-methyluridine-3'-phosphate
  modified_base 8: mod_base = OTHER; note = 2'-fluoroguanosine-3'-phosphate
  modified_base 9: mod_base = OTHER; note = 2'-fluoroguanosine-3'-phosphate
  modified_base 10: mod_base = OTHER; note = 2'-O-methyluridine-3'-phosphate
  modified_base 11: mod_base = OTHER; note = 2'-O-methyladenosine-3'-phosphate
  modified_base 12: mod_base = OTHER; note = 2'-O-methyluridine-3'-phosphate
  modified_base 13: mod_base = OTHER; note = 2'-O-methyladenosine-3'-phosphate
  modified_base 14: mod_base = OTHER; note = 2'-fluoroadenosine-3'-phosphate
  modified_base 15: mod_base = OTHER; note = 2'-O-methylcytidine-3'-phosphate
  modified_base 16: mod_base = OTHER; note = 2'-fluoroadenosine-3'-phosphate
  modified_base 17: mod_base = OTHER; note = 2'-O-methylcytidine-3'-phosphate
  modified_base 18: mod_base = OTHER; note = 2'-O-methyluridine-3'-phosphate
  modified_base 19: mod_base = OTHER; note = 2'-O-methyluridine-3'-phosphate
  modified_base 20: mod_base = OTHER; note = 2'-O-methylguanosine-3'-phosphate
  modified_base 21: mod_base = OTHER; note = 2'-O-methylguanosine-3'- phosphorothioate
  modified_base 22: mod_base = OTHER; note = 2'-O-methyladenosine-3'- phosphorothioate
  modified_base 23: mod_base = OTHER; note = 2'-O-methyluridine-3'-phosphate
tttagttggtataacacttggat

SEQ ID NO: 3797 - RNA, 23 nt, synthetic construct
  source 1..23: mol_type = other RNA
  modified_base 1: mod_base = OTHER; note = 2'-O-methyluridine-3'-phosphorothioate
  modified_base 2: mod_base = OTHER; note = 2'-fluoroguanosine-3'-phosphorothioate
  modified_base 3: mod_base = OTHER; note = 2'-O-methylguanosine-3'-phosphate
  modified_base 4: mod_base = OTHER; note = 2'-O-methyladenosine-3'-phosphate
  modified_base 5: mod_base = OTHER; note = 2'-O-methylcytidine-3'-phosphate
  modified_base 6: mod_base = OTHER; note = 2'-fluorouridine-3'-phosphate
  modified_base 7: mod_base = OTHER; note = 2'-O-methyluridine-3'-phosphate
  modified_base 8: mod_base = OTHER; note = 2'-fluoroguanosine-3'-phosphate
  modified_base 9: mod_base = OTHER; note = 2'-fluoroguanosine-3'-phosphate
  modified_base 10: mod_base = OTHER; note = 2'-O-methyladenosine-3'-phosphate
  modified_base 11: mod_base = OTHER; note = 2'-O-methyladenosine-3'-phosphate
  modified_base 12: mod_base = OTHER; note = 2'-O-methylcytidine-3'-phosphate
  modified_base 13: mod_base = OTHER; note = 2'-O-methylcytidine-3'-phosphate
  modified_base 14: mod_base = OTHER; note = 2'-fluoroadenosine-3'-phosphate
  modified_base 15: mod_base = OTHER; note = 2'-O-methyladenosine-3'-phosphate
  modified_base 16: mod_base = OTHER; note = 2'-fluoroadenosine-3'-phosphate
  modified_base 17: mod_base = OTHER; note = 2'-O-methyladenosine-3'-phosphate
  modified_base 18: mod_base = OTHER; note = 2'-O-methylguanosine-3'-phosphate
  modified_base 19: mod_base = OTHER; note = 2'-O-methylguanosine-3'-phosphate
  modified_base 20: mod_base = OTHER; note = 2'-O-methyladenosine-3'-phosphate
  modified_base 21: mod_base = OTHER; note = 2'-O-methyladenosine-3'- phosphorothioate
  modified_base 22: mod_base = OTHER; note = 2'-O-methyluridine-3'-phosphorothioate
  modified_base 23: mod_base = OTHER; note = 2'-O-methylcytidine-3'-phosphate
tggacttggaaccaaaaggaatc

SEQ ID NO: 3798 - RNA, 23 nt, synthetic construct
  source 1..23: mol_type = other RNA
  modified_base 1: mod_base = OTHER; note = 2'-O-methyluridine-3'-phosphorothioate
  modified_base 2: mod_base = OTHER; note = 2'-fluorouridine -3'-phosphorothioate
  modified_base 3: mod_base = OTHER; note = 2'-O-methylguanosine-3'-phosphate
  modified_base 4: mod_base = OTHER; note = 2'-O-methyluridine-3'-phosphate
  modified_base 5: mod_base = OTHER; note = 2'-O-methyluridine-3'-phosphate
  modified_base 6: mod_base = OTHER; note = 2'-fluorocytidine-3'-phosphate
  modified_base 7: mod_base = OTHER; note = 2'-O-methyluridine-3'-phosphate
  modified_base 8: mod_base = OTHER; note = 2'-fluoroadenosine-3'-phosphate
  modified_base 9: mod_base = OTHER; note = 2'-fluoroadenosine-3'-phosphate
  modified_base 10: mod_base = OTHER; note = 2'-O-methylguanosine-3'-phosphate
  modified_base 11: mod_base = OTHER; note = 2'-O-methylguanosine-3'-phosphate
  modified_base 12: mod_base = OTHER; note = 2'-O-methyladenosine-3'-phosphate
  modified_base 13: mod_base = OTHER; note = 2'-O-methyladenosine-3'-phosphate
  modified_base 14: mod_base = OTHER; note = 2'-fluoroadenosine-3'-phosphate
  modified_base 15: mod_base = OTHER; note = 2'-O-methyladenosine-3'-phosphate
  modified_base 16: mod_base = OTHER; note = 2'-fluoroguanosine-3'-phosphate
  modified_base 17: mod_base = OTHER; note = 2'-O-methylguanosine-3'-phosphate
  modified_base 18: mod_base = OTHER; note = 2'-O-methylcytidine-3'-phosphate
  modified_base 19: mod_base = OTHER; note = 2'-O-methyluridine-3'-phosphate
  modified_base 20: mod_base = OTHER; note = 2'-O-methylguanosine-3'-phosphate
  modified_base 21: mod_base = OTHER; note = 2'-O-methylcytidine-3'- phosphorothioate
  modified_base 22: mod_base = OTHER; note = 2'-O-methylcytidine-3'- phosphorothioate
  modified_base 23: mod_base = OTHER; note = 2'-O-methyladenosine-3'-phosphate
ttgttctaaggaaaaggctgcca

SEQ ID NO: 3799 - RNA, 23 nt, synthetic construct
  source 1..23: mol_type = other RNA
  modified_base 1: mod_base = OTHER; note = 2'-O-methyladenosine-3'- phosphorothioate
  modified_base 2: mod_base = OTHER; note = 2'-fluoroguanosine-3'-phosphorothioate
  modified_base 3: mod_base = OTHER; note = 2'-O-methyluridine-3'-phosphate
  modified_base 4: mod_base = OTHER; note = 2'-O-methylcytidine-3'-phosphate
  modified_base 5: mod_base = OTHER; note = 2'-O-methylcytidine-3'-phosphate
  modified_base 6: mod_base = OTHER; note = 2'-fluoroadenosine-3'-phosphate
  modified_base 7: mod_base = OTHER; note = 2'-O-methyluridine-3'-phosphate
  modified_base 8: mod_base = OTHER; note = 2'-fluorocytidine-3'-phosphate
  modified_base 9: mod_base = OTHER; note = 2'-fluorouridine-3'-phosphate
  modified_base 10: mod_base = OTHER; note = 2'-O-methyluridine-3'-phosphate
  modified_base 11: mod_base = OTHER; note = 2'-O-methyladenosine-3'-phosphate
  modified_base 12: mod_base = OTHER; note = 2'-O-methyladenosine-3'-phosphate
  modified_base 13: mod_base = OTHER; note = 2'-O-methyladenosine-3'-phosphate
  modified_base 14: mod_base = OTHER; note = 2'-fluoroadenosine-3'-phosphate
  modified_base 15: mod_base = OTHER; note = 2'-O-methyluridine-3'-phosphate
  modified_base 16: mod_base = OTHER; note = 2'-fluoroadenosine-3'-phosphate
  modified_base 17: mod_base = OTHER; note = 2'-O-methyluridine-3'-phosphate
  modified_base 18: mod_base = OTHER; note = 2'-O-methyluridine-3'-phosphate
  modified_base 19: mod_base = OTHER; note = 2'-O-methyladenosine-3'-phosphate
  modified_base 20: mod_base = OTHER; note = 2'-O-methylcytidine-3'-phosphate
  modified_base 21: mod_base = OTHER; note = 2'-O-methyluridine-3'-phosphorothioate
  modified_base 22: mod_base = OTHER; note = 2'-O-methylguanosine-3'- phosphorothioate
  modified_base 23: mod_base = OTHER; note = 2'-O-methylcytidine-3'-phosphate
agtccatcttaaaatattactgc

SEQ ID NO: 3800 - RNA, 23 nt, synthetic construct
  source 1..23: mol_type = other RNA
  modified_base 1: mod_base = OTHER; note = 2'-O-methyluridine-3'-phosphorothioate
  modified_base 2: mod_base = OTHER; note = 2'-fluoroadenosine-3'-phosphorothioate
  modified_base 3: mod_base = OTHER; note = 2'-O-methylguanosine-3'-phosphate
  modified_base 4: mod_base = OTHER; note = 2'-O-methylguanosine-3'-phosphate
  modified_base 5: mod_base = OTHER; note = 2'-O-methyladenosine-3'-phosphate
  modified_base 6: mod_base = OTHER; note = 2'-fluorouridine-3'-phosphate
  modified_base 7: mod_base = OTHER; note = 2'-O-methyladenosine-3'-phosphate
  modified_base 8: mod_base = OTHER; note = 2'-fluorouridine-3'-phosphate
  modified_base 9: mod_base = OTHER; note = 2'-fluoroadenosine-3'-phosphate
  modified_base 10: mod_base = OTHER; note = 2'-O-methylguanosine-3'-phosphate
  modified_base 11: mod_base = OTHER; note = 2'-O-methylcytidine-3'-phosphate
  modified_base 12: mod_base = OTHER; note = 2'-O-methyluridine-3'-phosphate
  modified_base 13: mod_base = OTHER; note = 2'-O-methylguanosine-3'-phosphate
  modified_base 14: mod_base = OTHER; note = 2'-fluorouridine-3'-phosphate
  modified_base 15: mod_base = OTHER; note = 2'-O-methylguanosine-3'-phosphate
  modified_base 16: mod_base = OTHER; note = 2'-fluoroguanosine-3'-phosphate
  modified_base 17: mod_base = OTHER; note = 2'-O-methyladenosine-3'-phosphate
  modified_base 18: mod_base = OTHER; note = 2'-O-methyluridine-3'-phosphate
  modified_base 19: mod_base = OTHER; note = 2'-O-methyluridine-3'-phosphate
  modified_base 20: mod_base = OTHER; note = 2'-O-methyluridine-3'-phosphate
  modified_base 21: mod_base = OTHER; note = 2'-O-methyluridine-3'-phosphorothioate
  modified_base 22: mod_base = OTHER; note = 2'-O-methyladenosine-3'- phosphorothioate
  modified_base 23: mod_base = OTHER; note = 2'-O-methylcytidine-3'-phosphate
taggatatagctgtggattttac

SEQ ID NO: 3801 - RNA, 23 nt, synthetic construct
  source 1..23: mol_type = other RNA
  modified_base 1: mod_base = OTHER; note = 2'-O-methyluridine-3'-phosphorothioate
  modified_base 2: mod_base = OTHER; note = 2'-fluorouridine -3'-phosphorothioate
  modified_base 3: mod_base = OTHER; note = 2'-O-methyladenosine-3'-phosphate
  modified_base 4: mod_base = OTHER; note = 2'-O-methylguanosine-3'-phosphate
  modified_base 5: mod_base = OTHER; note = 2'-O-methylguanosine-3'-phosphate
  modified_base 6: mod_base = OTHER; note = 2'-fluorocytidine-3'-phosphate
  modified_base 7: mod_base = OTHER; note = 2'-O-methyladenosine-3'-phosphate
  modified_base 8: mod_base = OTHER; note = 2'-fluorouridine-3'-phosphate
  modified_base 9: mod_base = OTHER; note = 2'-fluoroguanosine-3'-phosphate
  modified_base 10: mod_base = OTHER; note = 2'-O-methyluridine-3'-phosphate
  modified_base 11: mod_base = OTHER; note = 2'-O-methyluridine-3'-phosphate
  modified_base 12: mod_base = OTHER; note = 2'-O-methylcytidine-3'-phosphate
  modified_base 13: mod_base = OTHER; note = 2'-O-methyladenosine-3'-phosphate
  modified_base 14: mod_base = OTHER; note = 2'-fluoroguanosine-3'-phosphate
  modified_base 15: mod_base = OTHER; note = 2'-O-methyluridine-3'-phosphate
  modified_base 16: mod_base = OTHER; note = 2'-fluoroguanosine-3'-phosphate
  modified_base 17: mod_base = OTHER; note = 2'-O-methyladenosine-3'-phosphate
  modified_base 18: mod_base = OTHER; note = 2'-O-methyladenosine-3'-phosphate
  modified_base 19: mod_base = OTHER; note = 2'-O-methylguanosine-3'-phosphate
  modified_base 20: mod_base = OTHER; note = 2'-O-methylguanosine-3'-phosphate
  modified_base 21: mod_base = OTHER; note = 2'-O-methyladenosine-3'- phosphorothioate
  modified_base 22: mod_base = OTHER; note = 2'-O-methylguanosine-3'- phosphorothioate
  modified_base 23: mod_base = OTHER; note = 2'-O-methylcytidine-3'-phosphate
ttaggcatgttcagtgaaggagc

SEQ ID NO: 3802 - RNA, 23 nt, synthetic construct
  source 1..23: mol_type = other RNA
  modified_base 1: mod_base = OTHER; note = 2'-O-methyluridine-3'-phosphorothioate
  modified_base 2: mod_base = OTHER; note = 2'-fluorouridine -3'-phosphorothioate
  modified_base 3: mod_base = OTHER; note = 2'-O-methylguanosine-3'-phosphate
  modified_base 4: mod_base = OTHER; note = 2'-O-methylguanosine-3'-phosphate
  modified_base 5: mod_base = OTHER; note = 2'-O-methyladenosine-3'-phosphate
  modified_base 6: mod_base = OTHER; note = 2'-fluorocytidine-3'-phosphate
  modified_base 7: mod_base = OTHER; note = 2'-O-methyluridine-3'-phosphate
  modified_base 8: mod_base = OTHER; note = 2'-fluoroadenosine-3'-phosphate
  modified_base 9: mod_base = OTHER; note = 2'-fluoroguanosine-3'-phosphate
  modified_base 10: mod_base = OTHER; note = 2'-O-methylguanosine-3'-phosphate
  modified_base 11: mod_base = OTHER; note = 2'-O-methylcytidine-3'-phosphate
  modified_base 12: mod_base = OTHER; note = 2'-O-methyladenosine-3'-phosphate
  modified_base 13: mod_base = OTHER; note = 2'-O-methyluridine-3'-phosphate
  modified_base 14: mod_base = OTHER; note = 2'-fluoroguanosine-3'-phosphate
  modified_base 15: mod_base = OTHER; note = 2'-O-methyluridine-3'-phosphate
  modified_base 16: mod_base = OTHER; note = 2'-fluorouridine-3'-phosphate
  modified_base 17: mod_base = OTHER; note = 2'-O-methylcytidine-3'-phosphate
  modified_base 18: mod_base = OTHER; note = 2'-O-methyladenosine-3'-phosphate
  modified_base 19: mod_base = OTHER; note = 2'-O-methylguanosine-3'-phosphate
  modified_base 20: mod_base = OTHER; note = 2'-O-methyluridine-3'-phosphate
  modified_base 21: mod_base = OTHER; note = 2'-O-methylguanosine-3'- phosphorothioate
  modified_base 22: mod_base = OTHER; note = 2'-O-methyladenosine-3'- phosphorothioate
  modified_base 23: mod_base = OTHER; note = 2'-O-methyladenosine-3'-phosphate
ttggactaggcatgttcagtgaa

SEQ ID NO: 3803 - RNA, 23 nt, synthetic construct
  source 1..23: mol_type = other RNA
  modified_base 1: mod_base = OTHER; note = 2'-O-methylguanosine-3'- phosphorothioate
  modified_base 2: mod_base = OTHER; note = 2'-fluorouridine -3'-phosphorothioate
  modified_base 3: mod_base = OTHER; note = 2'-O-methyluridine-3'-phosphate
  modified_base 4: mod_base = OTHER; note = 2'-O-methyluridine-3'-phosphate
  modified_base 5: mod_base = OTHER; note = 2'-O-methyluridine-3'-phosphate
  modified_base 6: mod_base = OTHER; note = 2'-fluoroadenosine-3'-phosphate
  modified_base 7: mod_base = OTHER; note = 2'-O-methylguanosine-3'-phosphate
  modified_base 8: mod_base = OTHER; note = 2'-fluorouridine-3'-phosphate
  modified_base 9: mod_base = OTHER; note = 2'-fluorouridine-3'-phosphate
  modified_base 10: mod_base = OTHER; note = 2'-O-methylguanosine-3'-phosphate
  modified_base 11: mod_base = OTHER; note = 2'-O-methylguanosine-3'-phosphate
  modified_base 12: mod_base = OTHER; note = 2'-O-methyluridine-3'-phosphate
  modified_base 13: mod_base = OTHER; note = 2'-O-methyladenosine-3'-phosphate
  modified_base 14: mod_base = OTHER; note = 2'-fluorouridine-3'-phosphate
  modified_base 15: mod_base = OTHER; note = 2'-O-methyladenosine-3'-phosphate
  modified_base 16: mod_base = OTHER; note = 2'-fluoroadenosine-3'-phosphate
  modified_base 17: mod_base = OTHER; note = 2'-O-methylcytidine-3'-phosphate
  modified_base 18: mod_base = OTHER; note = 2'-O-methyladenosine-3'-phosphate
  modified_base 19: mod_base = OTHER; note = 2'-O-methylcytidine-3'-phosphate
  modified_base 20: mod_base = OTHER; note = 2'-O-methyluridine-3'-phosphate
  modified_base 21: mod_base = OTHER; note = 2'-O-methyluridine-3'-phosphorothioate
  modified_base 22: mod_base = OTHER; note = 2'-O-methylguanosine-3'- phosphorothioate
  modified_base 23: mod_base = OTHER; note = 2'-O-methylguanosine-3'-phosphate
gttttagttggtataacacttgg

SEQ ID NO: 3804 - RNA, 23 nt, synthetic construct
  source 1..23: mol_type = other RNA
  modified_base 1: mod_base = OTHER; note = 2'-O-methyladenosine-3'- phosphorothioate
  modified_base 2: mod_base = OTHER; note = 2'-fluoroguanosine-3'-phosphorothioate
  modified_base 3: mod_base = OTHER; note = 2'-O-methyladenosine-3'-phosphate
  modified_base 4: mod_base = OTHER; note = 2'-O-methylcytidine-3'-phosphate
  modified_base 5: mod_base = OTHER; note = 2'-O-methylcytidine-3'-phosphate
  modified_base 6: mod_base = OTHER; note = 2'-fluorocytidine-3'-phosphate
  modified_base 7: mod_base = OTHER; note = 2'-O-methyluridine-3'-phosphate
  modified_base 8: mod_base = OTHER; note = 2'-fluorouridine-3'-phosphate
  modified_base 9: mod_base = OTHER; note = 2'-fluoroadenosine-3'-phosphate
  modified_base 10: mod_base = OTHER; note = 2'-O-methyladenosine-3'-phosphate
  modified_base 11: mod_base = OTHER; note = 2'-O-methyluridine-3'-phosphate
  modified_base 12: mod_base = OTHER; note = 2'-O-methylcytidine-3'-phosphate
  modified_base 13: mod_base = OTHER; note = 2'-O-methyladenosine-3'-phosphate
  modified_base 14: mod_base = OTHER; note = 2'-fluorouridine-3'-phosphate
  modified_base 15: mod_base = OTHER; note = 2'-O-methylguanosine-3'-phosphate
  modified_base 16: mod_base = OTHER; note = 2'-fluoroguanosine-3'-phosphate
  modified_base 17: mod_base = OTHER; note = 2'-O-methyluridine-3'-phosphate
  modified_base 18: mod_base = OTHER; note = 2'-O-methylguanosine-3'-phosphate
  modified_base 19: mod_base = OTHER; note = 2'-O-methylguanosine-3'-phosphate
  modified_base 20: mod_base = OTHER; note = 2'-O-methyladenosine-3'-phosphate
  modified_base 21: mod_base = OTHER; note = 2'-O-methyladenosine-3'- phosphorothioate
  modified_base 22: mod_base = OTHER; note = 2'-O-methyladenosine-3'- phosphorothioate
  modified_base 23: mod_base = OTHER; note = 2'-O-methylcytidine-3'-phosphate
agacccttaatcatggtggaaac

SEQ ID NO: 3805 - RNA, 23 nt, synthetic construct
  source 1..23: mol_type = other RNA
  modified_base 1: mod_base = OTHER; note = 2'-O-methyladenosine-3'- phosphorothioate
  modified_base 2: mod_base = OTHER; note = 2'-fluoroadenosine-3'-phosphorothioate
  modified_base 3: mod_base = OTHER; note = 2'-O-methyluridine-3'-phosphate
  modified_base 4: mod_base = OTHER; note = 2'-O-methylguanosine-3'-phosphate
  modified_base 5: mod_base = OTHER; note = 2'-O-methyluridine-3'-phosphate
  modified_base 6: mod_base = OTHER; note = 2'-fluorouridine-3'-phosphate
  modified_base 7: mod_base = OTHER; note = 2'-O-methylguanosine-3'-phosphate
  modified_base 8: mod_base = OTHER; note = 2'-fluoroguanosine-3'-phosphate
  modified_base 9: mod_base = OTHER; note = 2'-fluoroadenosine-3'-phosphate
  modified_base 10: mod_base = OTHER; note = 2'-O-methylcytidine-3'-phosphate
  modified_base 11: mod_base = OTHER; note = 2'-O-methyluridine-3'-phosphate
  modified_base 12: mod_base = OTHER; note = 2'-O-methyladenosine-3'-phosphate
  modified_base 13: mod_base = OTHER; note = 2'-O-methylguanosine-3'-phosphate
  modified_base 14: mod_base = OTHER; note = 2'-fluoroguanosine-3'-phosphate
  modified_base 15: mod_base = OTHER; note = 2'-O-methylcytidine-3'-phosphate
  modified_base 16: mod_base = OTHER; note = 2'-fluoroadenosine-3'-phosphate
  modified_base 17: mod_base = OTHER; note = 2'-O-methyluridine-3'-phosphate
  modified_base 18: mod_base = OTHER; note = 2'-O-methylguanosine-3'-phosphate
  modified_base 19: mod_base = OTHER; note = 2'-O-methyluridine-3'-phosphate
  modified_base 20: mod_base = OTHER; note = 2'-O-methyluridine-3'-phosphate
  modified_base 21: mod_base = OTHER; note = 2'-O-methylcytidine-3'- phosphorothioate
  modified_base 22: mod_base = OTHER; note = 2'-O-methyladenosine-3'- phosphorothioate
  modified_base 23: mod_base = OTHER; note = 2'-O-methylguanosine-3'-phosphate
aatgttggactaggcatgttcag

SEQ ID NO: 3806 - RNA, 23 nt, synthetic construct
  source 1..23: mol_type = other RNA
  modified_base 1: mod_base = OTHER; note = 2'-O-methyladenosine-3'- phosphorothioate
  modified_base 2: mod_base = OTHER; note = 2'-fluorouridine -3'-phosphorothioate
  modified_base 3: mod_base = OTHER; note = 2'-O-methylguanosine-3'-phosphate
  modified_base 4: mod_base = OTHER; note = 2'-O-methylguanosine-3'-phosphate
  modified_base 5: mod_base = OTHER; note = 2'-O-methyluridine-3'-phosphate
  modified_base 6: mod_base = OTHER; note = 2'-fluoroadenosine-3'-phosphate
  modified_base 7: mod_base = OTHER; note = 2'-O-methyladenosine-3'-phosphate
  modified_base 8: mod_base = OTHER; note = 2'-fluorouridine-3'-phosphate
  modified_base 9: mod_base = OTHER; note = 2'-fluoroguanosine-3'-phosphate
  modified_base 10: mod_base = OTHER; note = 2'-O-methyluridine-3'-phosphate
  modified_base 11: mod_base = OTHER; note = 2'-O-methyladenosine-3'-phosphate
  modified_base 12: mod_base = OTHER; note = 2'-O-methylcytidine-3'-phosphate
  modified_base 13: mod_base = OTHER; note = 2'-O-methyladenosine-3'-phosphate
  modified_base 14: mod_base = OTHER; note = 2'-fluorocytidine-3'-phosphate
  modified_base 15: mod_base = OTHER; note = 2'-O-methyluridine-3'-phosphate
  modified_base 16: mod_base = OTHER; note = 2'-fluoroadenosine-3'-phosphate
  modified_base 17: mod_base = OTHER; note = 2'-O-methylcytidine-3'-phosphate
  modified_base 18: mod_base = OTHER; note = 2'-O-methyluridine-3'-phosphate
  modified_base 19: mod_base = OTHER; note = 2'-O-methylguanosine-3'-phosphate
  modified_base 20: mod_base = OTHER; note = 2'-O-methyladenosine-3'-phosphate
  modified_base 21: mod_base = OTHER; note = 2'-O-methyluridine-3'-phosphorothioate
  modified_base 22: mod_base = OTHER; note = 2'-O-methyladenosine-3'- phosphorothioate
  modified_base 23: mod_base = OTHER; note = 2'-O-methyluridine-3'-phosphate
atggtaatgtacactactgatat

SEQ ID NO: 3807 - RNA, 23 nt, synthetic construct
  source 1..23: mol_type = other RNA
  modified_base 1: mod_base = OTHER; note = 2'-O-methyluridine-3'-phosphorothioate
  modified_base 2: mod_base = OTHER; note = 2'-fluoroadenosine-3'-phosphorothioate
  modified_base 3: mod_base = OTHER; note = 2'-O-methylguanosine-3'-phosphate
  modified_base 4: mod_base = OTHER; note = 2'-O-methyluridine-3'-phosphate
  modified_base 5: mod_base = OTHER; note = 2'-O-methyluridine-3'-phosphate
  modified_base 6: mod_base = OTHER; note = 2'-fluoroguanosine-3'-phosphate
  modified_base 7: mod_base = OTHER; note = 2'-O-methylguanosine-3'-phosphate
  modified_base 8: mod_base = OTHER; note = 2'-fluorouridine-3'-phosphate
  modified_base 9: mod_base = OTHER; note = 2'-fluoroadenosine-3'-phosphate
  modified_base 10: mod_base = OTHER; note = 2'-O-methyluridine-3'-phosphate
  modified_base 11: mod_base = OTHER; note = 2'-O-methyladenosine-3'-phosphate
  modified_base 12: mod_base = OTHER; note = 2'-O-methyladenosine-3'-phosphate
  modified_base 13: mod_base = OTHER; note = 2'-O-methylcytidine-3'-phosphate
  modified_base 14: mod_base = OTHER; note = 2'-fluoroadenosine-3'-phosphate
  modified_base 15: mod_base = OTHER; note = 2'-O-methylcytidine-3'-phosphate
  modified_base 16: mod_base = OTHER; note = 2'-fluorouridine-3'-phosphate
  modified_base 17: mod_base = OTHER; note = 2'-O-methyluridine-3'-phosphate
  modified_base 18: mod_base = OTHER; note = 2'-O-methylguanosine-3'-phosphate
  modified_base 19: mod_base = OTHER; note = 2'-O-methylguanosine-3'-phosphate
  modified_base 20: mod_base = OTHER; note = 2'-O-methyladenosine-3'-phosphate
  modified_base 21: mod_base = OTHER; note = 2'-O-methyluridine-3'-phosphorothioate
  modified_base 22: mod_base = OTHER; note = 2'-O-methyladenosine-3'- phosphorothioate
  modified_base 23: mod_base = OTHER; note = 2'-O-methylguanosine-3'-phosphate
tagttggtataacacttggatag

SEQ ID NO: 3808 - RNA, 23 nt, synthetic construct
  source 1..23: mol_type = other RNA
  modified_base 1: mod_base = OTHER; note = 2'-O-methyluridine-3'-phosphorothioate
  modified_base 2: mod_base = OTHER; note = 2'-fluoroadenosine-3'-phosphorothioate
  modified_base 3: mod_base = OTHER; note = 2'-O-methylguanosine-3'-phosphate
  modified_base 4: mod_base = OTHER; note = 2'-O-methyluridine-3'-phosphate
  modified_base 5: mod_base = OTHER; note = 2'-O-methyluridine-3'-phosphate
  modified_base 6: mod_base = OTHER; note = 2'-fluoroguanosine-3'-phosphate
  modified_base 7: mod_base = OTHER; note = 2'-O-methylcytidine-3'-phosphate
  modified_base 8: mod_base = OTHER; note = 2'-fluorocytidine-3'-phosphate
  modified_base 9: mod_base = OTHER; note = 2'-fluoroadenosine-3'-phosphate
  modified_base 10: mod_base = OTHER; note = 2'-O-methyluridine-3'-phosphate
  modified_base 11: mod_base = OTHER; note = 2'-O-methyladenosine-3'-phosphate
  modified_base 12: mod_base = OTHER; note = 2'-O-methyluridine-3'-phosphate
  modified_base 13: mod_base = OTHER; note = 2'-O-methyluridine-3'-phosphate
  modified_base 14: mod_base = OTHER; note = 2'-fluoroguanosine-3'-phosphate
  modified_base 15: mod_base = OTHER; note = 2'-O-methylguanosine-3'-phosphate
  modified_base 16: mod_base = OTHER; note = 2'-fluoroadenosine-3'-phosphate
  modified_base 17: mod_base = OTHER; note = 2'-O-methylcytidine-3'-phosphate
  modified_base 18: mod_base = OTHER; note = 2'-O-methyluridine-3'-phosphate
  modified_base 19: mod_base = OTHER; note = 2'-O-methyluridine-3'-phosphate
  modified_base 20: mod_base = OTHER; note = 2'-O-methylguanosine-3'-phosphate
  modified_base 21: mod_base = OTHER; note = 2'-O-methylguanosine-3'- phosphorothioate
  modified_base 22: mod_base = OTHER; note = 2'-O-methyladenosine-3'- phosphorothioate
  modified_base 23: mod_base = OTHER; note = 2'-O-methyladenosine-3'-phosphate
tagttgccatattggacttggaa

SEQ ID NO: 3809 - RNA, 23 nt, synthetic construct
  source 1..23: mol_type = other RNA
  modified_base 1: mod_base = OTHER; note = 2'-O-methyluridine-3'-phosphorothioate
  modified_base 2: mod_base = OTHER; note = 2'-fluoroadenosine-3'-phosphorothioate
  modified_base 3: mod_base = OTHER; note = 2'-O-methylcytidine-3'-phosphate
  modified_base 4: mod_base = OTHER; note = 2'-O-methylcytidine-3'-phosphate
  modified_base 5: mod_base = OTHER; note = 2'-O-methyluridine-3'-phosphate
  modified_base 6: mod_base = OTHER; note = 2'-fluorouridine-3'-phosphate
  modified_base 7: mod_base = OTHER; note = 2'-O-methylcytidine-3'-phosphate
  modified_base 8: mod_base = OTHER; note = 2'-fluoroadenosine-3'-phosphate
  modified_base 9: mod_base = OTHER; note = 2'-fluorocytidine-3'-phosphate
  modified_base 10: mod_base = OTHER; note = 2'-O-methyladenosine-3'-phosphate
  modified_base 11: mod_base = OTHER; note = 2'-O-methyladenosine-3'-phosphate
  modified_base 12: mod_base = OTHER; note = 2'-O-methylguanosine-3'-phosphate
  modified_base 13: mod_base = OTHER; note = 2'-O-methylguanosine-3'-phosphate
  modified_base 14: mod_base = OTHER; note = 2'-fluorouridine-3'-phosphate
  modified_base 15: mod_base = OTHER; note = 2'-O-methylcytidine-3'-phosphate
  modified_base 16: mod_base = OTHER; note = 2'-fluorouridine-3'-phosphate
  modified_base 17: mod_base = OTHER; note = 2'-O-methylguanosine-3'-phosphate
  modified_base 18: mod_base = OTHER; note = 2'-O-methyladenosine-3'-phosphate
  modified_base 19: mod_base = OTHER; note = 2'-O-methylguanosine-3'-phosphate
  modified_base 20: mod_base = OTHER; note = 2'-O-methyladenosine-3'-phosphate
  modified_base 21: mod_base = OTHER; note = 2'-O-methyluridine-3'-phosphorothioate
  modified_base 22: mod_base = OTHER; note = 2'-O-methyluridine-3'-phosphorothioate
  modified_base 23: mod_base = OTHER; note = 2'-O-methylcytidine-3'-phosphate
taccttcacaaggtctgagattc

SEQ ID NO: 3810 - RNA, 23 nt, synthetic construct
  source 1..23: mol_type = other RNA
  modified_base 1: mod_base = OTHER; note = 2'-O-methyluridine-3'-phosphorothioate
  modified_base 2: mod_base = OTHER; note = 2'-fluoroguanosine-3'-phosphorothioate
  modified_base 3: mod_base = OTHER; note = 2'-O-methyluridine-3'-phosphate
  modified_base 4: mod_base = OTHER; note = 2'-O-methyladenosine-3'-phosphate
  modified_base 5: mod_base = OTHER; note = 2'-O-methylguanosine-3'-phosphate
  modified_base 6: mod_base = OTHER; note = 2'-fluorocytidine-3'-phosphate
  modified_base 7: mod_base = OTHER; note = 2'-O-methylcytidine-3'-phosphate
  modified_base 8: mod_base = OTHER; note = 2'-fluorouridine-3'-phosphate
  modified_base 9: mod_base = OTHER; note = 2'-fluoroadenosine-3'-phosphate
  modified_base 10: mod_base = OTHER; note = 2'-O-methylguanosine-3'-phosphate
  modified_base 11: mod_base = OTHER; note = 2'-O-methyladenosine-3'-phosphate
  modified_base 12: mod_base = OTHER; note = 2'-O-methylcytidine-3'-phosphate
  modified_base 13: mod_base = OTHER; note = 2'-O-methyladenosine-3'-phosphate
  modified_base 14: mod_base = OTHER; note = 2'-fluoroguanosine-3'-phosphate
  modified_base 15: mod_base = OTHER; note = 2'-O-methyluridine-3'-phosphate
  modified_base 16: mod_base = OTHER; note = 2'-fluoroguanosine-3'-phosphate
  modified_base 17: mod_base = OTHER; note = 2'-O-methyladenosine-3'-phosphate
  modified_base 18: mod_base = OTHER; note = 2'-O-methyladenosine-3'-phosphate
  modified_base 19: mod_base = OTHER; note = 2'-O-methyladenosine-3'-phosphate
  modified_base 20: mod_base = OTHER; note = 2'-O-methyluridine-3'-phosphate
  modified_base 21: mod_base = OTHER; note = 2'-O-methylguanosine-3'- phosphorothioate
  modified_base 22: mod_base = OTHER; note = 2'-O-methyladenosine-3'- phosphorothioate
  modified_base 23: mod_base = OTHER; note = 2'-O-methyluridine-3'-phosphate
tgtagcctagacagtgaaatgat

SEQ ID NO: 3811 - RNA, 23 nt, synthetic construct
  source 1..23: mol_type = other RNA
  modified_base 1: mod_base = OTHER; note = 2'-O-methyladenosine-3'- phosphorothioate
  modified_base 2: mod_base = OTHER; note = 2'-fluoroguanosine-3'-phosphorothioate
  modified_base 3: mod_base = OTHER; note = 2'-O-methylcytidine-3'-phosphate
  modified_base 4: mod_base = OTHER; note = 2'-O-methyladenosine-3'-phosphate
  modified_base 5: mod_base = OTHER; note = 2'-O-methyluridine-3'-phosphate
  modified_base 6: mod_base = OTHER; note = 2'-fluorocytidine-3'-phosphate
  modified_base 7: mod_base = OTHER; note = 2'-O-methyladenosine-3'-phosphate
  modified_base 8: mod_base = OTHER; note = 2'-fluoroguanosine-3'-phosphate
  modified_base 9: mod_base = OTHER; note = 2'-fluoroguanosine-3'-phosphate
  modified_base 10: mod_base = OTHER; note = 2'-O-methyladenosine-3'-phosphate
  modified_base 11: mod_base = OTHER; note = 2'-O-methyluridine-3'-phosphate
  modified_base 12: mod_base = OTHER; note = 2'-O-methyladenosine-3'-phosphate
  modified_base 13: mod_base = OTHER; note = 2'-O-methyluridine-3'-phosphate
  modified_base 14: mod_base = OTHER; note = 2'-fluoroadenosine-3'-phosphate
  modified_base 15: mod_base = OTHER; note = 2'-O-methylguanosine-3'-phosphate
  modified_base 16: mod_base = OTHER; note = 2'-fluorocytidine-3'-phosphate
  modified_base 17: mod_base = OTHER; note = 2'-O-methyluridine-3'-phosphate
  modified_base 18: mod_base = OTHER; note = 2'-O-methylguanosine-3'-phosphate
  modified_base 19: mod_base = OTHER; note = 2'-O-methyluridine-3'-phosphate
  modified_base 20: mod_base = OTHER; note = 2'-O-methylguanosine-3'-phosphate
  modified_base 21: mod_base = OTHER; note = 2'-O-methylguanosine-3'- phosphorothioate
  modified_base 22: mod_base = OTHER; note = 2'-O-methyladenosine-3'- phosphorothioate
  modified_base 23: mod_base = OTHER; note = 2'-O-methyluridine-3'-phosphate
agcatcaggatatagctgtggat

SEQ ID NO: 3812 - RNA, 23 nt, synthetic construct
  source 1..23: mol_type = other RNA
  modified_base 1: mod_base = OTHER; note = 2'-O-methyluridine-3'-phosphorothioate
  modified_base 2: mod_base = OTHER; note = 2'-fluoroadenosine-3'-phosphorothioate
  modified_base 3: mod_base = OTHER; note = 2'-O-methylcytidine-3'-phosphate
  modified_base 4: mod_base = OTHER; note = 2'-O-methyluridine-3'-phosphate
  modified_base 5: mod_base = OTHER; note = 2'-O-methyladenosine-3'-phosphate
  modified_base 6: mod_base = OTHER; note = 2'-fluoroguanosine-3'-phosphate
  modified_base 7: mod_base = OTHER; note = 2'-O-methylguanosine-3'-phosphate
  modified_base 8: mod_base = OTHER; note = 2'-fluorocytidine-3'-phosphate
  modified_base 9: mod_base = OTHER; note = 2'-fluoroadenosine-3'-phosphate
  modified_base 10: mod_base = OTHER; note = 2'-O-methyluridine-3'-phosphate
  modified_base 11: mod_base = OTHER; note = 2'-O-methylguanosine-3'-phosphate
  modified_base 12: mod_base = OTHER; note = 2'-O-methyluridine-3'-phosphate
  modified_base 13: mod_base = OTHER; note = 2'-O-methyluridine-3'-phosphate
  modified_base 14: mod_base = OTHER; note = 2'-fluorocytidine-3'-phosphate
  modified_base 15: mod_base = OTHER; note = 2'-O-methyladenosine-3'-phosphate
  modified_base 16: mod_base = OTHER; note = 2'-fluoroguanosine-3'-phosphate
  modified_base 17: mod_base = OTHER; note = 2'-O-methyluridine-3'-phosphate
  modified_base 18: mod_base = OTHER; note = 2'-O-methylguanosine-3'-phosphate
  modified_base 19: mod_base = OTHER; note = 2'-O-methyladenosine-3'-phosphate
  modified_base 20: mod_base = OTHER; note = 2'-O-methyladenosine-3'-phosphate
  modified_base 21: mod_base = OTHER; note = 2'-O-methylguanosine-3'- phosphorothioate
  modified_base 22: mod_base = OTHER; note = 2'-O-methylguanosine-3'- phosphorothioate
  modified_base 23: mod_base = OTHER; note = 2'-O-methyladenosine-3'-phosphate
tactaggcatgttcagtgaagga

SEQ ID NO: 3813 - RNA, 23 nt, synthetic construct
  source 1..23: mol_type = other RNA
  modified_base 1: mod_base = OTHER; note = 2'-O-methyluridine-3'-phosphorothioate
  modified_base 2: mod_base = OTHER; note = 2'-fluorouridine -3'-phosphorothioate
  modified_base 3: mod_base = OTHER; note = 2'-O-methylcytidine-3'-phosphate
  modified_base 4: mod_base = OTHER; note = 2'-O-methyladenosine-3'-phosphate
  modified_base 5: mod_base = OTHER; note = 2'-O-methyluridine-3'-phosphate
  modified_base 6: mod_base = OTHER; note = 2'-fluoroadenosine-3'-phosphate
  modified_base 7: mod_base = OTHER; note = 2'-O-methyladenosine-3'-phosphate
  modified_base 8: mod_base = OTHER; note = 2'-fluoroguanosine-3'-phosphate
  modified_base 9: mod_base = OTHER; note = 2'-fluorocytidine-3'-phosphate
  modified_base 10: mod_base = OTHER; note = 2'-O-methyladenosine-3'-phosphate
  modified_base 11: mod_base = OTHER; note = 2'-O-methylcytidine-3'-phosphate
  modified_base 12: mod_base = OTHER; note = 2'-O-methyluridine-3'-phosphate
  modified_base 13: mod_base = OTHER; note = 2'-O-methylcytidine-3'-phosphate
  modified_base 14: mod_base = OTHER; note = 2'-fluorouridine-3'-phosphate
  modified_base 15: mod_base = OTHER; note = 2'-O-methylcytidine-3'-phosphate
  modified_base 16: mod_base = OTHER; note = 2'-fluoroadenosine-3'-phosphate
  modified_base 17: mod_base = OTHER; note = 2'-O-methyladenosine-3'-phosphate
  modified_base 18: mod_base = OTHER; note = 2'-O-methylcytidine-3'-phosphate
  modified_base 19: mod_base = OTHER; note = 2'-O-methylcytidine-3'-phosphate
  modified_base 20: mod_base = OTHER; note = 2'-O-methyladenosine-3'-phosphate
  modified_base 21: mod_base = OTHER; note = 2'-O-methylcytidine-3'- phosphorothioate
  modified_base 22: mod_base = OTHER; note = 2'-O-methylcytidine-3'- phosphorothioate
  modified_base 23: mod_base = OTHER; note = 2'-O-methyluridine-3'-phosphate
ttcataagcactctcaaccacct

SEQ ID NO: 3814 - RNA, 23 nt, synthetic construct
  source 1..23: mol_type = other RNA
  modified_base 1: mod_base = OTHER; note = 2'-O-methyluridine-3'-phosphorothioate
  modified_base 2: mod_base = OTHER; note = 2'-fluoroadenosine-3'-phosphorothioate
  modified_base 3: mod_base = OTHER; note = 2'-O-methyluridine-3'-phosphate
  modified_base 4: mod_base = OTHER; note = 2'-O-methylguanosine-3'-phosphate
  modified_base 5: mod_base = OTHER; note = 2'-O-methyluridine-3'-phosphate
  modified_base 6: mod_base = OTHER; note = 2'-fluoroguanosine-3'-phosphate
  modified_base 7: mod_base = OTHER; note = 2'-O-methyluridine-3'-phosphate
  modified_base 8: mod_base = OTHER; note = 2'-fluoroadenosine-3'-phosphate
  modified_base 9: mod_base = OTHER; note = 2'-fluoroguanosine-3'-phosphate
  modified_base 10: mod_base = OTHER; note = 2'-O-methylcytidine-3'-phosphate
  modified_base 11: mod_base = OTHER; note = 2'-O-methylcytidine-3'-phosphate
  modified_base 12: mod_base = OTHER; note = 2'-O-methyluridine-3'-phosphate
  modified_base 13: mod_base = OTHER; note = 2'-O-methyluridine-3'-phosphate
  modified_base 14: mod_base = OTHER; note = 2'-fluorouridine-3'-phosphate
  modified_base 15: mod_base = OTHER; note = 2'-O-methylguanosine-3'-phosphate
  modified_base 16: mod_base = OTHER; note = 2'-fluoroadenosine-3'-phosphate
  modified_base 17: mod_base = OTHER; note = 2'-O-methylguanosine-3'-phosphate
  modified_base 18: mod_base = OTHER; note = 2'-O-methyluridine-3'-phosphate
  modified_base 19: mod_base = OTHER; note = 2'-O-methyluridine-3'-phosphate
  modified_base 20: mod_base = OTHER; note = 2'-O-methyluridine-3'-phosphate
  modified_base 21: mod_base = OTHER; note = 2'-O-methylguanosine-3'- phosphorothioate
  modified_base 22: mod_base = OTHER; note = 2'-O-methyladenosine-3'- phosphorothioate
  modified_base 23: mod_base = OTHER; note = 2'-O-methyluridine-3'-phosphate
tatgtgtagcctttgagtttgat

SEQ ID NO: 3815 - RNA, 23 nt, synthetic construct
  source 1..23: mol_type = other RNA
  modified_base 1: mod_base = OTHER; note = 2'-O-methyluridine-3'-phosphorothioate
  modified_base 2: mod_base = OTHER; note = 2'-fluoroguanosine-3'-phosphorothioate
  modified_base 3: mod_base = OTHER; note = 2'-O-methyluridine-3'-phosphate
  modified_base 4: mod_base = OTHER; note = 2'-O-methyladenosine-3'-phosphate
  modified_base 5: mod_base = OTHER; note = 2'-O-methyladenosine-3'-phosphate
  modified_base 6: mod_base = OTHER; note = 2'-fluorouridine-3'-phosphate
  modified_base 7: mod_base = OTHER; note = 2'-O-methylguanosine-3'-phosphate
  modified_base 8: mod_base = OTHER; note = 2'-fluorouridine-3'-phosphate
  modified_base 9: mod_base = OTHER; note = 2'-fluoroadenosine-3'-phosphate
  modified_base 10: mod_base = OTHER; note = 2'-O-methylcytidine-3'-phosphate
  modified_base 11: mod_base = OTHER; note = 2'-O-methyladenosine-3'-phosphate
  modified_base 12: mod_base = OTHER; note = 2'-O-methylcytidine-3'-phosphate
  modified_base 13: mod_base = OTHER; note = 2'-O-methyluridine-3'-phosphate
  modified_base 14: mod_base = OTHER; note = 2'-fluoroadenosine-3'-phosphate
  modified_base 15: mod_base = OTHER; note = 2'-O-methylcytidine-3'-phosphate
  modified_base 16: mod_base = OTHER; note = 2'-fluorouridine-3'-phosphate
  modified_base 17: mod_base = OTHER; note = 2'-O-methylguanosine-3'-phosphate
  modified_base 18: mod_base = OTHER; note = 2'-O-methyladenosine-3'-phosphate
  modified_base 19: mod_base = OTHER; note = 2'-O-methyluridine-3'-phosphate
  modified_base 20: mod_base = OTHER; note = 2'-O-methyladenosine-3'-phosphate
  modified_base 21: mod_base = OTHER; note = 2'-O-methyluridine-3'-phosphorothioate
  modified_base 22: mod_base = OTHER; note = 2'-O-methyladenosine-3'- phosphorothioate
  modified_base 23: mod_base = OTHER; note = 2'-O-methylguanosine-3'-phosphate
tgtaatgtacactactgatatag

SEQ ID NO: 3816 - RNA, 23 nt, synthetic construct
  source 1..23: mol_type = other RNA
  modified_base 1: mod_base = OTHER; note = 2'-O-methyluridine-3'-phosphorothioate
  modified_base 2: mod_base = OTHER; note = 2'-fluoroadenosine-3'-phosphorothioate
  modified_base 3: mod_base = OTHER; note = 2'-O-methyladenosine-3'-phosphate
  modified_base 4: mod_base = OTHER; note = 2'-O-methylcytidine-3'-phosphate
  modified_base 5: mod_base = OTHER; note = 2'-O-methyladenosine-3'-phosphate
  modified_base 6: mod_base = OTHER; note = 2'-fluorocytidine-3'-phosphate
  modified_base 7: mod_base = OTHER; note = 2'-O-methyluridine-3'-phosphate
  modified_base 8: mod_base = OTHER; note = 2'-fluorouridine-3'-phosphate
  modified_base 9: mod_base = OTHER; note = 2'-fluoroguanosine-3'-phosphate
  modified_base 10: mod_base = OTHER; note = 2'-O-methylguanosine-3'-phosphate
  modified_base 11: mod_base = OTHER; note = 2'-O-methyladenosine-3'-phosphate
  modified_base 12: mod_base = OTHER; note = 2'-O-methyluridine-3'-phosphate
  modified_base 13: mod_base = OTHER; note = 2'-O-methyladenosine-3'-phosphate
  modified_base 14: mod_base = OTHER; note = 2'-fluoroguanosine-3'-phosphate
  modified_base 15: mod_base = OTHER; note = 2'-O-methyluridine-3'-phosphate
  modified_base 16: mod_base = OTHER; note = 2'-fluorouridine-3'-phosphate
  modified_base 17: mod_base = OTHER; note = 2'-O-methylguanosine-3'-phosphate
  modified_base 18: mod_base = OTHER; note = 2'-O-methylguanosine-3'-phosphate
  modified_base 19: mod_base = OTHER; note = 2'-O-methyluridine-3'-phosphate
  modified_base 20: mod_base = OTHER; note = 2'-O-methyluridine-3'-phosphate
  modified_base 21: mod_base = OTHER; note = 2'-O-methylguanosine-3'- phosphorothioate
  modified_base 22: mod_base = OTHER; note = 2'-O-methylcytidine-3'- phosphorothioate
  modified_base 23: mod_base = OTHER; note = 2'-O-methyladenosine-3'-phosphate
taacacttggatagttggttgca

SEQ ID NO: 3817 - RNA, 23 nt, synthetic construct
  source 1..23: mol_type = other RNA
  modified_base 1: mod_base = OTHER; note = 2'-O-methyluridine-3'-phosphorothioate
  modified_base 2: mod_base = OTHER; note = 2'-fluorocytidine-3'-phosphorothioate
  modified_base 3: mod_base = OTHER; note = 2'-O-methyluridine-3'-phosphate
  modified_base 4: mod_base = OTHER; note = 2'-O-methyluridine-3'-phosphate
  modified_base 5: mod_base = OTHER; note = 2'-O-methylcytidine-3'-phosphate
  modified_base 6: mod_base = OTHER; note = 2'-fluoroadenosine-3'-phosphate
  modified_base 7: mod_base = OTHER; note = 2'-O-methyladenosine-3'-phosphate
  modified_base 8: mod_base = OTHER; note = 2'-fluorouridine-3'-phosphate
  modified_base 9: mod_base = OTHER; note = 2'-fluorouridine-3'-phosphate
  modified_base 10: mod_base = OTHER; note = 2'-O-methyluridine-3'-phosphate
  modified_base 11: mod_base = OTHER; note = 2'-O-methylguanosine-3'-phosphate
  modified_base 12: mod_base = OTHER; note = 2'-O-methyluridine-3'-phosphate
  modified_base 13: mod_base = OTHER; note = 2'-O-methylcytidine-3'-phosphate
  modified_base 14: mod_base = OTHER; note = 2'-fluorouridine-3'-phosphate
  modified_base 15: mod_base = OTHER; note = 2'-O-methyluridine-3'-phosphate
  modified_base 16: mod_base = OTHER; note = 2'-fluorocytidine-3'-phosphate
  modified_base 17: mod_base = OTHER; note = 2'-O-methylguanosine-3'-phosphate
  modified_base 18: mod_base = OTHER; note = 2'-O-methyladenosine-3'-phosphate
  modified_base 19: mod_base = OTHER; note = 2'-O-methyluridine-3'-phosphate
  modified_base 20: mod_base = OTHER; note = 2'-O-methylguanosine-3'-phosphate
  modified_base 21: mod_base = OTHER; note = 2'-O-methyladenosine-3'- phosphorothioate
  modified_base 22: mod_base = OTHER; note = 2'-O-methylcytidine-3'- phosphorothioate
  modified_base 23: mod_base = OTHER; note = 2'-O-methyladenosine-3'-phosphate
tcttcaatttgtcttcgatgaca

SEQ ID NO: 3818 - RNA, 23 nt, synthetic construct
  source 1..23: mol_type = other RNA
  modified_base 1: mod_base = OTHER; note = 2'-O-methyluridine-3'-phosphorothioate
  modified_base 2: mod_base = OTHER; note = 2'-fluoroadenosine-3'-phosphorothioate
  modified_base 3: mod_base = OTHER; note = 2'-O-methyluridine-3'-phosphate
  modified_base 4: mod_base = OTHER; note = 2'-O-methyladenosine-3'-phosphate
  modified_base 5: mod_base = OTHER; note = 2'-O-methylcytidine-3'-phosphate
  modified_base 6: mod_base = OTHER; note = 2'-fluorouridine-3'-phosphate
  modified_base 7: mod_base = OTHER; note = 2'-O-methylcytidine-3'-phosphate
  modified_base 8: mod_base = OTHER; note = 2'-fluorouridine-3'-phosphate
  modified_base 9: mod_base = OTHER; note = 2'-fluorocytidine-3'-phosphate
  modified_base 10: mod_base = OTHER; note = 2'-O-methyluridine-3'-phosphate
  modified_base 11: mod_base = OTHER; note = 2'-O-methylguanosine-3'-phosphate
  modified_base 12: mod_base = OTHER; note = 2'-O-methylcytidine-3'-phosphate
  modified_base 13: mod_base = OTHER; note = 2'-O-methylcytidine-3'-phosphate
  modified_base 14: mod_base = OTHER; note = 2'-fluoroadenosine-3'-phosphate
  modified_base 15: mod_base = OTHER; note = 2'-O-methyladenosine-3'-phosphate
  modified_base 16: mod_base = OTHER; note = 2'-fluoroadenosine-3'-phosphate
  modified_base 17: mod_base = OTHER; note = 2'-O-methyluridine-3'-phosphate
  modified_base 18: mod_base = OTHER; note = 2'-O-methylcytidine-3'-phosphate
  modified_base 19: mod_base = OTHER; note = 2'-O-methyluridine-3'-phosphate
  modified_base 20: mod_base = OTHER; note = 2'-O-methylguanosine-3'-phosphate
  modified_base 21: mod_base = OTHER; note = 2'-O-methylcytidine-3'- phosphorothioate
  modified_base 22: mod_base = OTHER; note = 2'-O-methyluridine-3'-phosphorothioate
  modified_base 23: mod_base = OTHER; note = 2'-O-methyladenosine-3'-phosphate
tatactctctgccaaatctgcta

SEQ ID NO: 3819 - RNA, 23 nt, synthetic construct
  source 1..23: mol_type = other RNA
  modified_base 1: mod_base = OTHER; note = 2'-O-methyluridine-3'-phosphorothioate
  modified_base 2: mod_base = OTHER; note = 2'-fluoroadenosine-3'-phosphorothioate
  modified_base 3: mod_base = OTHER; note = 2'-O-methylguanosine-3'-phosphate
  modified_base 4: mod_base = OTHER; note = 2'-O-methylguanosine-3'-phosphate
  modified_base 5: mod_base = OTHER; note = 2'-O-methylcytidine-3'-phosphate
  modified_base 6: mod_base = OTHER; note = 2'-fluoroadenosine-3'-phosphate
  modified_base 7: mod_base = OTHER; note = 2'-O-methyluridine-3'-phosphate
  modified_base 8: mod_base = OTHER; note = 2'-fluoroguanosine-3'-phosphate
  modified_base 9: mod_base = OTHER; note = 2'-fluorouridine-3'-phosphate
  modified_base 10: mod_base = OTHER; note = 2'-O-methyluridine-3'-phosphate
  modified_base 11: mod_base = OTHER; note = 2'-O-methylcytidine-3'-phosphate
  modified_base 12: mod_base = OTHER; note = 2'-O-methyladenosine-3'-phosphate
  modified_base 13: mod_base = OTHER; note = 2'-O-methylguanosine-3'-phosphate
  modified_base 14: mod_base = OTHER; note = 2'-fluorouridine-3'-phosphate
  modified_base 15: mod_base = OTHER; note = 2'-O-methylguanosine-3'-phosphate
  modified_base 16: mod_base = OTHER; note = 2'-fluoroadenosine-3'-phosphate
  modified_base 17: mod_base = OTHER; note = 2'-O-methyladenosine-3'-phosphate
  modified_base 18: mod_base = OTHER; note = 2'-O-methylguanosine-3'-phosphate
  modified_base 19: mod_base = OTHER; note = 2'-O-methylguanosine-3'-phosphate
  modified_base 20: mod_base = OTHER; note = 2'-O-methyladenosine-3'-phosphate
  modified_base 21: mod_base = OTHER; note = 2'-O-methylguanosine-3'- phosphorothioate
  modified_base 22: mod_base = OTHER; note = 2'-O-methylcytidine-3'- phosphorothioate
  modified_base 23: mod_base = OTHER; note = 2'-O-methylcytidine-3'-phosphate
taggcatgttcagtgaaggagcc

SEQ ID NO: 3820 - RNA, 23 nt, synthetic construct
  source 1..23: mol_type = other RNA
  modified_base 1: mod_base = OTHER; note = 2'-O-methyladenosine-3'- phosphorothioate
  modified_base 2: mod_base = OTHER; note = 2'-fluoroadenosine-3'-phosphorothioate
  modified_base 3: mod_base = OTHER; note = 2'-O-methyladenosine-3'-phosphate
  modified_base 4: mod_base = OTHER; note = 2'-O-methyladenosine-3'-phosphate
  modified_base 5: mod_base = OTHER; note = 2'-O-methyladenosine-3'-phosphate
  modified_base 6: mod_base = OTHER; note = 2'-fluorouridine-3'-phosphate
  modified_base 7: mod_base = OTHER; note = 2'-O-methylguanosine-3'-phosphate
  modified_base 8: mod_base = OTHER; note = 2'-fluorouridine-3'-phosphate
  modified_base 9: mod_base = OTHER; note = 2'-fluorouridine-3'-phosphate
  modified_base 10: mod_base = OTHER; note = 2'-O-methylguanosine-3'-phosphate
  modified_base 11: mod_base = OTHER; note = 2'-O-methylguanosine-3'-phosphate
  modified_base 12: mod_base = OTHER; note = 2'-O-methyladenosine-3'-phosphate
  modified_base 13: mod_base = OTHER; note = 2'-O-methylcytidine-3'-phosphate
  modified_base 14: mod_base = OTHER; note = 2'-fluorouridine-3'-phosphate
  modified_base 15: mod_base = OTHER; note = 2'-O-methyladenosine-3'-phosphate
  modified_base 16: mod_base = OTHER; note = 2'-fluoroguanosine-3'-phosphate
  modified_base 17: mod_base = OTHER; note = 2'-O-methylguanosine-3'-phosphate
  modified_base 18: mod_base = OTHER; note = 2'-O-methylcytidine-3'-phosphate
  modified_base 19: mod_base = OTHER; note = 2'-O-methyladenosine-3'-phosphate
  modified_base 20: mod_base = OTHER; note = 2'-O-methyluridine-3'-phosphate
  modified_base 21: mod_base = OTHER; note = 2'-O-methylguanosine-3'- phosphorothioate
  modified_base 22: mod_base = OTHER; note = 2'-O-methyluridine-3'-phosphorothioate
  modified_base 23: mod_base = OTHER; note = 2'-O-methyluridine-3'-phosphate
aaaaatgttggactaggcatgtt

SEQ ID NO: 3821 - RNA, 23 nt, synthetic construct
  source 1..23: mol_type = other RNA
  modified_base 1: mod_base = OTHER; note = 2'-O-methyluridine-3'-phosphorothioate
  modified_base 2: mod_base = OTHER; note = 2'-fluorouridine -3'-phosphorothioate
  modified_base 3: mod_base = OTHER; note = 2'-O-methylcytidine-3'-phosphate
  modified_base 4: mod_base = OTHER; note = 2'-O-methyladenosine-3'-phosphate
  modified_base 5: mod_base = OTHER; note = 2'-O-methyluridine-3'-phosphate
  modified_base 6: mod_base = OTHER; note = 2'-fluorouridine-3'-phosphate
  modified_base 7: mod_base = OTHER; note = 2'-O-methyladenosine-3'-phosphate
  modified_base 8: mod_base = OTHER; note = 2'-fluoroadenosine-3'-phosphate
  modified_base 9: mod_base = OTHER; note = 2'-fluoroguanosine-3'-phosphate
  modified_base 10: mod_base = OTHER; note = 2'-O-methyladenosine-3'-phosphate
  modified_base 11: mod_base = OTHER; note = 2'-O-methyluridine-3'-phosphate
  modified_base 12: mod_base = OTHER; note = 2'-O-methyladenosine-3'-phosphate
  modified_base 13: mod_base = OTHER; note = 2'-O-methylcytidine-3'-phosphate
  modified_base 14: mod_base = OTHER; note = 2'-fluorouridine-3'-phosphate
  modified_base 15: mod_base = OTHER; note = 2'-O-methylguanosine-3'-phosphate
  modified_base 16: mod_base = OTHER; note = 2'-fluoroadenosine-3'-phosphate
  modified_base 17: mod_base = OTHER; note = 2'-O-methyluridine-3'-phosphate
  modified_base 18: mod_base = OTHER; note = 2'-O-methylguanosine-3'-phosphate
  modified_base 19: mod_base = OTHER; note = 2'-O-methylguanosine-3'-phosphate
  modified_base 20: mod_base = OTHER; note = 2'-O-methylcytidine-3'-phosphate
  modified_base 21: mod_base = OTHER; note = 2'-O-methyladenosine-3'- phosphorothioate
  modified_base 22: mod_base = OTHER; note = 2'-O-methylcytidine-3'- phosphorothioate
  modified_base 23: mod_base = OTHER; note = 2'-O-methyladenosine-3'-phosphate
ttcattaagatactgatggcaca

SEQ ID NO: 3822 - RNA, 23 nt, synthetic construct
  source 1..23: mol_type = other RNA
  modified_base 1: mod_base = OTHER; note = 2'-O-methyluridine-3'-phosphorothioate
  modified_base 2: mod_base = OTHER; note = 2'-fluorouridine -3'-phosphorothioate
  modified_base 3: mod_base = OTHER; note = 2'-O-methyluridine-3'-phosphate
  modified_base 4: mod_base = OTHER; note = 2'-O-methylcytidine-3'-phosphate
  modified_base 5: mod_base = OTHER; note = 2'-O-methyladenosine-3'-phosphate
  modified_base 6: mod_base = OTHER; note = 2'-fluorouridine-3'-phosphate
  modified_base 7: mod_base = OTHER; note = 2'-O-methyluridine-3'-phosphate
  modified_base 8: mod_base = OTHER; note = 2'-fluoroadenosine-3'-phosphate
  modified_base 9: mod_base = OTHER; note = 2'-fluoroadenosine-3'-phosphate
  modified_base 10: mod_base = OTHER; note = 2'-O-methylguanosine-3'-phosphate
  modified_base 11: mod_base = OTHER; note = 2'-O-methyladenosine-3'-phosphate
  modified_base 12: mod_base = OTHER; note = 2'-O-methyluridine-3'-phosphate
  modified_base 13: mod_base = OTHER; note = 2'-O-methyladenosine-3'-phosphate
  modified_base 14: mod_base = OTHER; note = 2'-fluorocytidine-3'-phosphate
  modified_base 15: mod_base = OTHER; note = 2'-O-methyluridine-3'-phosphate
  modified_base 16: mod_base = OTHER; note = 2'-fluoroguanosine-3'-phosphate
  modified_base 17: mod_base = OTHER; note = 2'-O-methyladenosine-3'-phosphate
  modified_base 18: mod_base = OTHER; note = 2'-O-methyluridine-3'-phosphate
  modified_base 19: mod_base = OTHER; note = 2'-O-methylguanosine-3'-phosphate
  modified_base 20: mod_base = OTHER; note = 2'-O-methylguanosine-3'-phosphate
  modified_base 21: mod_base = OTHER; note = 2'-O-methylcytidine-3'- phosphorothioate
  modified_base 22: mod_base = OTHER; note = 2'-O-methyladenosine-3'- phosphorothioate
  modified_base 23: mod_base = OTHER; note = 2'-O-methylcytidine-3'-phosphate
tttcattaagatactgatggcac

SEQ ID NO: 3823 - RNA, 23 nt, synthetic construct
  source 1..23: mol_type = other RNA
  modified_base 1: mod_base = OTHER; note = 2'-O-methyladenosine-3'- phosphorothioate
  modified_base 2: mod_base = OTHER; note = 2'-fluoroguanosine-3'-phosphorothioate
  modified_base 3: mod_base = OTHER; note = 2'-O-methyladenosine-3'-phosphate
  modified_base 4: mod_base = OTHER; note = 2'-O-methylcytidine-3'-phosphate
  modified_base 5: mod_base = OTHER; note = 2'-O-methyladenosine-3'-phosphate
  modified_base 6: mod_base = OTHER; note = 2'-fluoroadenosine-3'-phosphate
  modified_base 7: mod_base = OTHER; note = 2'-O-methyluridine-3'-phosphate
  modified_base 8: mod_base = OTHER; note = 2'-fluorocytidine-3'-phosphate
  modified_base 9: mod_base = OTHER; note = 2'-fluorouridine-3'-phosphate
  modified_base 10: mod_base = OTHER; note = 2'-O-methyluridine-3'-phosphate
  modified_base 11: mod_base = OTHER; note = 2'-O-methyluridine-3'-phosphate
  modified_base 12: mod_base = OTHER; note = 2'-O-methylguanosine-3'-phosphate
  modified_base 13: mod_base = OTHER; note = 2'-O-methylguanosine-3'-phosphate
  modified_base 14: mod_base = OTHER; note = 2'-fluorouridine-3'-phosphate
  modified_base 15: mod_base = OTHER; note = 2'-O-methylguanosine-3'-phosphate
  modified_base 16: mod_base = OTHER; note = 2'-fluorouridine-3'-phosphate
  modified_base 17: mod_base = OTHER; note = 2'-O-methyluridine-3'-phosphate
  modified_base 18: mod_base = OTHER; note = 2'-O-methylcytidine-3'-phosphate
  modified_base 19: mod_base = OTHER; note = 2'-O-methyluridine-3'-phosphate
  modified_base 20: mod_base = OTHER; note = 2'-O-methyladenosine-3'-phosphate
  modified_base 21: mod_base = OTHER; note = 2'-O-methyladenosine-3'- phosphorothioate
  modified_base 22: mod_base = OTHER; note = 2'-O-methylguanosine-3'- phosphorothioate
  modified_base 23: mod_base = OTHER; note = 2'-O-methylguanosine-3'-phosphate
agacaatctttggtgttctaagg

SEQ ID NO: 3824 - RNA, 23 nt, synthetic construct
  source 1..23: mol_type = other RNA
  modified_base 1: mod_base = OTHER; note = 2'-O-methyluridine-3'-phosphorothioate
  modified_base 2: mod_base = OTHER; note = 2'-fluoroadenosine-3'-phosphorothioate
  modified_base 3: mod_base = OTHER; note = 2'-O-methylguanosine-3'-phosphate
  modified_base 4: mod_base = OTHER; note = 2'-O-methylcytidine-3'-phosphate
  modified_base 5: mod_base = OTHER; note = 2'-O-methylcytidine-3'-phosphate
  modified_base 6: mod_base = OTHER; note = 2'-fluorouridine-3'-phosphate
  modified_base 7: mod_base = OTHER; note = 2'-O-methyladenosine-3'-phosphate
  modified_base 8: mod_base = OTHER; note = 2'-fluoroguanosine-3'-phosphate
  modified_base 9: mod_base = OTHER; note = 2'-fluoroadenosine-3'-phosphate
  modified_base 10: mod_base = OTHER; note = 2'-O-methylcytidine-3'-phosphate
  modified_base 11: mod_base = OTHER; note = 2'-O-methyladenosine-3'-phosphate
  modified_base 12: mod_base = OTHER; note = 2'-O-methylguanosine-3'-phosphate
  modified_base 13: mod_base = OTHER; note = 2'-O-methyluridine-3'-phosphate
  modified_base 14: mod_base = OTHER; note = 2'-fluoroguanosine-3'-phosphate
  modified_base 15: mod_base = OTHER; note = 2'-O-methyladenosine-3'-phosphate
  modified_base 16: mod_base = OTHER; note = 2'-fluoroadenosine-3'-phosphate
  modified_base 17: mod_base = OTHER; note = 2'-O-methyladenosine-3'-phosphate
  modified_base 18: mod_base = OTHER; note = 2'-O-methyluridine-3'-phosphate
  modified_base 19: mod_base = OTHER; note = 2'-O-methylguanosine-3'-phosphate
  modified_base 20: mod_base = OTHER; note = 2'-O-methyladenosine-3'-phosphate
  modified_base 21: mod_base = OTHER; note = 2'-O-methyluridine-3'-phosphorothioate
  modified_base 22: mod_base = OTHER; note = 2'-O-methyladenosine-3'- phosphorothioate
  modified_base 23: mod_base = OTHER; note = 2'-O-methyluridine-3'-phosphate
tagcctagacagtgaaatgatat

SEQ ID NO: 3825 - RNA, 23 nt, synthetic construct
  source 1..23: mol_type = other RNA
  modified_base 1: mod_base = OTHER; note = 2'-O-methyluridine-3'-phosphorothioate
  modified_base 2: mod_base = OTHER; note = 2'-fluorouridine -3'-phosphorothioate
  modified_base 3: mod_base = OTHER; note = 2'-O-methylguanosine-3'-phosphate
  modified_base 4: mod_base = OTHER; note = 2'-O-methyluridine-3'-phosphate
  modified_base 5: mod_base = OTHER; note = 2'-O-methyluridine-3'-phosphate
  modified_base 6: mod_base = OTHER; note = 2'-fluoroguanosine-3'-phosphate
  modified_base 7: mod_base = OTHER; note = 2'-O-methyluridine-3'-phosphate
  modified_base 8: mod_base = OTHER; note = 2'-fluoroadenosine-3'-phosphate
  modified_base 9: mod_base = OTHER; note = 2'-fluoroguanosine-3'-phosphate
  modified_base 10: mod_base = OTHER; note = 2'-O-methylcytidine-3'-phosphate
  modified_base 11: mod_base = OTHER; note = 2'-O-methylcytidine-3'-phosphate
  modified_base 12: mod_base = OTHER; note = 2'-O-methyluridine-3'-phosphate
  modified_base 13: mod_base = OTHER; note = 2'-O-methyladenosine-3'-phosphate
  modified_base 14: mod_base = OTHER; note = 2'-fluoroguanosine-3'-phosphate
  modified_base 15: mod_base = OTHER; note = 2'-O-methyladenosine-3'-phosphate
  modified_base 16: mod_base = OTHER; note = 2'-fluorocytidine-3'-phosphate
  modified_base 17: mod_base = OTHER; note = 2'-O-methyladenosine-3'-phosphate
  modified_base 18: mod_base = OTHER; note = 2'-O-methylguanosine-3'-phosphate
  modified_base 19: mod_base = OTHER; note = 2'-O-methyluridine-3'-phosphate
  modified_base 20: mod_base = OTHER; note = 2'-O-methylguanosine-3'-phosphate
  modified_base 21: mod_base = OTHER; note = 2'-O-methyladenosine-3'- phosphorothioate
  modified_base 22: mod_base = OTHER; note = 2'-O-methyladenosine-3'- phosphorothioate
  modified_base 23: mod_base = OTHER; note = 2'-O-methyladenosine-3'-phosphate
ttgttgtagcctagacagtgaaa

SEQ ID NO: 3826 - RNA, 23 nt, synthetic construct
  source 1..23: mol_type = other RNA
  modified_base 1: mod_base = OTHER; note = 2'-O-methyluridine-3'-phosphorothioate
  modified_base 2: mod_base = OTHER; note = 2'-fluorouridine -3'-phosphorothioate
  modified_base 3: mod_base = OTHER; note = 2'-O-methylguanosine-3'-phosphate
  modified_base 4: mod_base = OTHER; note = 2'-O-methylguanosine-3'-phosphate
  modified_base 5: mod_base = OTHER; note = 2'-O-methyladenosine-3'-phosphate
  modified_base 6: mod_base = OTHER; note = 2'-fluorouridine-3'-phosphate
  modified_base 7: mod_base = OTHER; note = 2'-O-methyluridine-3'-phosphate
  modified_base 8: mod_base = OTHER; note = 2'-fluorouridine-3'-phosphate
  modified_base 9: mod_base = OTHER; note = 2'-fluoroadenosine-3'-phosphate
  modified_base 10: mod_base = OTHER; note = 2'-O-methyluridine-3'-phosphate
  modified_base 11: mod_base = OTHER; note = 2'-O-methyladenosine-3'-phosphate
  modified_base 12: mod_base = OTHER; note = 2'-O-methylcytidine-3'-phosphate
  modified_base 13: mod_base = OTHER; note = 2'-O-methyladenosine-3'-phosphate
  modified_base 14: mod_base = OTHER; note = 2'-fluorocytidine-3'-phosphate
  modified_base 15: mod_base = OTHER; note = 2'-O-methyluridine-3'-phosphate
  modified_base 16: mod_base = OTHER; note = 2'-fluoroguanosine-3'-phosphate
  modified_base 17: mod_base = OTHER; note = 2'-O-methylguanosine-3'-phosphate
  modified_base 18: mod_base = OTHER; note = 2'-O-methyladenosine-3'-phosphate
  modified_base 19: mod_base = OTHER; note = 2'-O-methyluridine-3'-phosphate
  modified_base 20: mod_base = OTHER; note = 2'-O-methylcytidine-3'-phosphate
  modified_base 21: mod_base = OTHER; note = 2'-O-methylcytidine-3'- phosphorothioate
  modified_base 22: mod_base = OTHER; note = 2'-O-methylcytidine-3'- phosphorothioate
  modified_base 23: mod_base = OTHER; note = 2'-O-methyladenosine-3'-phosphate
ttggatttatacactggatccca

SEQ ID NO: 3827 - RNA, 23 nt, synthetic construct
  source 1..23: mol_type = other RNA
  modified_base 1: mod_base = OTHER; note = 2'-O-methyluridine-3'-phosphorothioate
  modified_base 2: mod_base = OTHER; note = 2'-fluoroguanosine-3'-phosphorothioate
  modified_base 3: mod_base = OTHER; note = 2'-O-methyluridine-3'-phosphate
  modified_base 4: mod_base = OTHER; note = 2'-O-methyladenosine-3'-phosphate
  modified_base 5: mod_base = OTHER; note = 2'-O-methyluridine-3'-phosphate
  modified_base 6: mod_base = OTHER; note = 2'-fluoroadenosine-3'-phosphate
  modified_base 7: mod_base = OTHER; note = 2'-O-methyladenosine-3'-phosphate
  modified_base 8: mod_base = OTHER; note = 2'-fluorocytidine-3'-phosphate
  modified_base 9: mod_base = OTHER; note = 2'-fluoroadenosine-3'-phosphate
  modified_base 10: mod_base = OTHER; note = 2'-O-methylcytidine-3'-phosphate
  modified_base 11: mod_base = OTHER; note = 2'-O-methyluridine-3'-phosphate
  modified_base 12: mod_base = OTHER; note = 2'-O-methyluridine-3'-phosphate
  modified_base 13: mod_base = OTHER; note = 2'-O-methylguanosine-3'-phosphate
  modified_base 14: mod_base = OTHER; note = 2'-fluoroguanosine-3'-phosphate
  modified_base 15: mod_base = OTHER; note = 2'-O-methyladenosine-3'-phosphate
  modified_base 16: mod_base = OTHER; note = 2'-fluorouridine-3'-phosphate
  modified_base 17: mod_base = OTHER; note = 2'-O-methyladenosine-3'-phosphate
  modified_base 18: mod_base = OTHER; note = 2'-O-methylguanosine-3'-phosphate
  modified_base 19: mod_base = OTHER; note = 2'-O-methyluridine-3'-phosphate
  modified_base 20: mod_base = OTHER; note = 2'-O-methyluridine-3'-phosphate
  modified_base 21: mod_base = OTHER; note = 2'-O-methylguanosine-3'- phosphorothioate
  modified_base 22: mod_base = OTHER; note = 2'-O-methylguanosine-3'- phosphorothioate
  modified_base 23: mod_base = OTHER; note = 2'-O-methyluridine-3'-phosphate
tgtataacacttggatagttggt

SEQ ID NO: 3828 - RNA, 23 nt, synthetic construct
  source 1..23: mol_type = other RNA
  modified_base 1: mod_base = OTHER; note = 2'-O-methyluridine-3'-phosphorothioate
  modified_base 2: mod_base = OTHER; note = 2'-fluorocytidine-3'-phosphorothioate
  modified_base 3: mod_base = OTHER; note = 2'-O-methyladenosine-3'-phosphate
  modified_base 4: mod_base = OTHER; note = 2'-O-methyluridine-3'-phosphate
  modified_base 5: mod_base = OTHER; note = 2'-O-methyladenosine-3'-phosphate
  modified_base 6: mod_base = OTHER; note = 2'-fluorouridine-3'-phosphate
  modified_base 7: mod_base = OTHER; note = 2'-O-methyluridine-3'-phosphate
  modified_base 8: mod_base = OTHER; note = 2'-fluoroguanosine-3'-phosphate
  modified_base 9: mod_base = OTHER; note = 2'-fluoroguanosine-3'-phosphate
  modified_base 10: mod_base = OTHER; note = 2'-O-methyladenosine-3'-phosphate
  modified_base 11: mod_base = OTHER; note = 2'-O-methylcytidine-3'-phosphate
  modified_base 12: mod_base = OTHER; note = 2'-O-methyluridine-3'-phosphate
  modified_base 13: mod_base = OTHER; note = 2'-O-methyluridine-3'-phosphate
  modified_base 14: mod_base = OTHER; note = 2'-fluoroguanosine-3'-phosphate
  modified_base 15: mod_base = OTHER; note = 2'-O-methylguanosine-3'-phosphate
  modified_base 16: mod_base = OTHER; note = 2'-fluoroadenosine-3'-phosphate
  modified_base 17: mod_base = OTHER; note = 2'-O-methyladenosine-3'-phosphate
  modified_base 18: mod_base = OTHER; note = 2'-O-methylcytidine-3'-phosphate
  modified_base 19: mod_base = OTHER; note = 2'-O-methylcytidine-3'-phosphate
  modified_base 20: mod_base = OTHER; note = 2'-O-methyladenosine-3'-phosphate
  modified_base 21: mod_base = OTHER; note = 2'-O-methyladenosine-3'- phosphorothioate
  modified_base 22: mod_base = OTHER; note = 2'-O-methyladenosine-3'- phosphorothioate
  modified_base 23: mod_base = OTHER; note = 2'-O-methyladenosine-3'-phosphate
tcatattggacttggaaccaaaa

SEQ ID NO: 3829 - RNA, 23 nt, synthetic construct
  source 1..23: mol_type = other RNA
  modified_base 1: mod_base = OTHER; note = 2'-O-methyladenosine-3'- phosphorothioate
  modified_base 2: mod_base = OTHER; note = 2'-fluoroguanosine-3'-phosphorothioate
  modified_base 3: mod_base = OTHER; note = 2'-O-methyluridine-3'-phosphate
  modified_base 4: mod_base = OTHER; note = 2'-O-methyluridine-3'-phosphate
  modified_base 5: mod_base = OTHER; note = 2'-O-methyluridine-3'-phosphate
  modified_base 6: mod_base = OTHER; note = 2'-fluoroguanosine-3'-phosphate
  modified_base 7: mod_base = OTHER; note = 2'-O-methyladenosine-3'-phosphate
  modified_base 8: mod_base = OTHER; note = 2'-fluorouridine-3'-phosphate
  modified_base 9: mod_base = OTHER; note = 2'-fluorocytidine-3'-phosphate
  modified_base 10: mod_base = OTHER; note = 2'-O-methyladenosine-3'-phosphate
  modified_base 11: mod_base = OTHER; note = 2'-O-methylcytidine-3'-phosphate
  modified_base 12: mod_base = OTHER; note = 2'-O-methylcytidine-3'-phosphate
  modified_base 13: mod_base = OTHER; note = 2'-O-methyluridine-3'-phosphate
  modified_base 14: mod_base = OTHER; note = 2'-fluorocytidine-3'-phosphate
  modified_base 15: mod_base = OTHER; note = 2'-O-methyladenosine-3'-phosphate
  modified_base 16: mod_base = OTHER; note = 2'-fluorouridine-3'-phosphate
  modified_base 17: mod_base = OTHER; note = 2'-O-methyladenosine-3'-phosphate
  modified_base 18: mod_base = OTHER; note = 2'-O-methyladenosine-3'-phosphate
  modified_base 19: mod_base = OTHER; note = 2'-O-methylguanosine-3'-phosphate
  modified_base 20: mod_base = OTHER; note = 2'-O-methylcytidine-3'-phosphate
  modified_base 21: mod_base = OTHER; note = 2'-O-methyladenosine-3'- phosphorothioate
  modified_base 22: mod_base = OTHER; note = 2'-O-methylcytidine-3'- phosphorothioate
  modified_base 23: mod_base = OTHER; note = 2'-O-methyluridine-3'-phosphate
agtttgatcacctcataagcact

SEQ ID NO: 3830 - RNA, 23 nt, synthetic construct
  source 1..23: mol_type = other RNA
  modified_base 1: mod_base = OTHER; note = 2'-O-methyluridine-3'-phosphorothioate
  modified_base 2: mod_base = OTHER; note = 2'-fluoroguanosine-3'-phosphorothioate
  modified_base 3: mod_base = OTHER; note = 2'-O-methyladenosine-3'-phosphate
  modified_base 4: mod_base = OTHER; note = 2'-O-methyluridine-3'-phosphate
  modified_base 5: mod_base = OTHER; note = 2'-O-methylguanosine-3'-phosphate
  modified_base 6: mod_base = OTHER; note = 2'-fluorouridine-3'-phosphate
  modified_base 7: mod_base = OTHER; note = 2'-O-methylguanosine-3'-phosphate
  modified_base 8: mod_base = OTHER; note = 2'-fluorouridine-3'-phosphate
  modified_base 9: mod_base = OTHER; note = 2'-fluoroadenosine-3'-phosphate
  modified_base 10: mod_base = OTHER; note = 2'-O-methylguanosine-3'-phosphate
  modified_base 11: mod_base = OTHER; note = 2'-O-methylcytidine-3'-phosphate
  modified_base 12: mod_base = OTHER; note = 2'-O-methylcytidine-3'-phosphate
  modified_base 13: mod_base = OTHER; note = 2'-O-methyluridine-3'-phosphate
  modified_base 14: mod_base = OTHER; note = 2'-fluorouridine-3'-phosphate
  modified_base 15: mod_base = OTHER; note = 2'-O-methyluridine-3'-phosphate
  modified_base 16: mod_base = OTHER; note = 2'-fluoroguanosine-3'-phosphate
  modified_base 17: mod_base = OTHER; note = 2'-O-methyladenosine-3'-phosphate
  modified_base 18: mod_base = OTHER; note = 2'-O-methylguanosine-3'-phosphate
  modified_base 19: mod_base = OTHER; note = 2'-O-methyluridine-3'-phosphate
  modified_base 20: mod_base = OTHER; note = 2'-O-methyluridine-3'-phosphate
  modified_base 21: mod_base = OTHER; note = 2'-O-methyluridine-3'-phosphorothioate
  modified_base 22: mod_base = OTHER; note = 2'-O-methylguanosine-3'- phosphorothioate
  modified_base 23: mod_base = OTHER; note = 2'-O-methyladenosine-3'-phosphate
tgatgtgtagcctttgagtttga

SEQ ID NO: 3831 - RNA, 23 nt, synthetic construct
  source 1..23: mol_type = other RNA
  modified_base 1: mod_base = OTHER; note = 2'-O-methyluridine-3'-phosphorothioate
  modified_base 2: mod_base = OTHER; note = 2'-fluorocytidine-3'-phosphorothioate
  modified_base 3: mod_base = OTHER; note = 2'-O-methyladenosine-3'-phosphate
  modified_base 4: mod_base = OTHER; note = 2'-O-methylcytidine-3'-phosphate
  modified_base 5: mod_base = OTHER; note = 2'-O-methylcytidine-3'-phosphate
  modified_base 6: mod_base = OTHER; note = 2'-fluorouridine-3'-phosphate
  modified_base 7: mod_base = OTHER; note = 2'-O-methyluridine-3'-phosphate
  modified_base 8: mod_base = OTHER; note = 2'-fluorocytidine-3'-phosphate
  modified_base 9: mod_base = OTHER; note = 2'-fluoroadenosine-3'-phosphate
  modified_base 10: mod_base = OTHER; note = 2'-O-methylcytidine-3'-phosphate
  modified_base 11: mod_base = OTHER; note = 2'-O-methyladenosine-3'-phosphate
  modified_base 12: mod_base = OTHER; note = 2'-O-methyladenosine-3'-phosphate
  modified_base 13: mod_base = OTHER; note = 2'-O-methylguanosine-3'-phosphate
  modified_base 14: mod_base = OTHER; note = 2'-fluoroguanosine-3'-phosphate
  modified_base 15: mod_base = OTHER; note = 2'-O-methyluridine-3'-phosphate
  modified_base 16: mod_base = OTHER; note = 2'-fluorocytidine-3'-phosphate
  modified_base 17: mod_base = OTHER; note = 2'-O-methyluridine-3'-phosphate
  modified_base 18: mod_base = OTHER; note = 2'-O-methylguanosine-3'-phosphate
  modified_base 19: mod_base = OTHER; note = 2'-O-methyladenosine-3'-phosphate
  modified_base 20: mod_base = OTHER; note = 2'-O-methylguanosine-3'-phosphate
  modified_base 21: mod_base = OTHER; note = 2'-O-methyladenosine-3'- phosphorothioate
  modified_base 22: mod_base = OTHER; note = 2'-O-methyluridine-3'-phosphorothioate
  modified_base 23: mod_base = OTHER; note = 2'-O-methyluridine-3'-phosphate
tcaccttcacaaggtctgagatt

SEQ ID NO: 3832 - RNA, 23 nt, synthetic construct
  source 1..23: mol_type = other RNA
  modified_base 1: mod_base = OTHER; note = 2'-O-methyladenosine-3'- phosphorothioate
  modified_base 2: mod_base = OTHER; note = 2'-fluoroguanosine-3'-phosphorothioate
  modified_base 3: mod_base = OTHER; note = 2'-O-methylguanosine-3'-phosphate
  modified_base 4: mod_base = OTHER; note = 2'-O-methyladenosine-3'-phosphate
  modified_base 5: mod_base = OTHER; note = 2'-O-methyluridine-3'-phosphate
  modified_base 6: mod_base = OTHER; note = 2'-fluoroadenosine-3'-phosphate
  modified_base 7: mod_base = OTHER; note = 2'-O-methyluridine-3'-phosphate
  modified_base 8: mod_base = OTHER; note = 2'-fluoroadenosine-3'-phosphate
  modified_base 9: mod_base = OTHER; note = 2'-fluoroguanosine-3'-phosphate
  modified_base 10: mod_base = OTHER; note = 2'-O-methylcytidine-3'-phosphate
  modified_base 11: mod_base = OTHER; note = 2'-O-methyluridine-3'-phosphate
  modified_base 12: mod_base = OTHER; note = 2'-O-methylguanosine-3'-phosphate
  modified_base 13: mod_base = OTHER; note = 2'-O-methyluridine-3'-phosphate
  modified_base 14: mod_base = OTHER; note = 2'-fluoroguanosine-3'-phosphate
  modified_base 15: mod_base = OTHER; note = 2'-O-methylguanosine-3'-phosphate
  modified_base 16: mod_base = OTHER; note = 2'-fluoroadenosine-3'-phosphate
  modified_base 17: mod_base = OTHER; note = 2'-O-methyluridine-3'-phosphate
  modified_base 18: mod_base = OTHER; note = 2'-O-methyluridine-3'-phosphate
  modified_base 19: mod_base = OTHER; note = 2'-O-methyluridine-3'-phosphate
  modified_base 20: mod_base = OTHER; note = 2'-O-methyluridine-3'-phosphate
  modified_base 21: mod_base = OTHER; note = 2'-O-methyladenosine-3'- phosphorothioate
  modified_base 22: mod_base = OTHER; note = 2'-O-methylcytidine-3'- phosphorothioate
  modified_base 23: mod_base = OTHER; note = 2'-O-methyladenosine-3'-phosphate
aggatatagctgtggattttaca

SEQ ID NO: 3833 - RNA, 23 nt, synthetic construct
  source 1..23: mol_type = other RNA
  modified_base 1: mod_base = OTHER; note = 2'-O-methyladenosine-3'- phosphorothioate
  modified_base 2: mod_base = OTHER; note = 2'-fluorocytidine-3'-phosphorothioate
  modified_base 3: mod_base = OTHER; note = 2'-O-methyluridine-3'-phosphate
  modified_base 4: mod_base = OTHER; note = 2'-O-methyladenosine-3'-phosphate
  modified_base 5: mod_base = OTHER; note = 2'-O-methylguanosine-3'-phosphate
  modified_base 6: mod_base = OTHER; note = 2'-fluoroguanosine-3'-phosphate
  modified_base 7: mod_base = OTHER; note = 2'-O-methylcytidine-3'-phosphate
  modified_base 8: mod_base = OTHER; note = 2'-fluoroadenosine-3'-phosphate
  modified_base 9: mod_base = OTHER; note = 2'-fluorouridine-3'-phosphate
  modified_base 10: mod_base = OTHER; note = 2'-O-methylguanosine-3'-phosphate
  modified_base 11: mod_base = OTHER; note = 2'-O-methyluridine-3'-phosphate
  modified_base 12: mod_base = OTHER; note = 2'-O-methyluridine-3'-phosphate
  modified_base 13: mod_base = OTHER; note = 2'-O-methylcytidine-3'-phosphate
  modified_base 14: mod_base = OTHER; note = 2'-fluoroadenosine-3'-phosphate
  modified_base 15: mod_base = OTHER; note = 2'-O-methylguanosine-3'-phosphate
  modified_base 16: mod_base = OTHER; note = 2'-fluorouridine-3'-phosphate
  modified_base 17: mod_base = OTHER; note = 2'-O-methylguanosine-3'-phosphate
  modified_base 18: mod_base = OTHER; note = 2'-O-methyladenosine-3'-phosphate
  modified_base 19: mod_base = OTHER; note = 2'-O-methyladenosine-3'-phosphate
  modified_base 20: mod_base = OTHER; note = 2'-O-methylguanosine-3'-phosphate
  modified_base 21: mod_base = OTHER; note = 2'-O-methylguanosine-3'- phosphorothioate
  modified_base 22: mod_base = OTHER; note = 2'-O-methyladenosine-3'- phosphorothioate
  modified_base 23: mod_base = OTHER; note = 2'-O-methylguanosine-3'-phosphate
actaggcatgttcagtgaaggag

SEQ ID NO: 3834 - RNA, 23 nt, synthetic construct
  source 1..23: mol_type = other RNA
  modified_base 1: mod_base = OTHER; note = 2'-O-methyluridine-3'-phosphorothioate
  modified_base 2: mod_base = OTHER; note = 2'-fluoroguanosine-3'-phosphorothioate
  modified_base 3: mod_base = OTHER; note = 2'-O-methylguanosine-3'-phosphate
  modified_base 4: mod_base = OTHER; note = 2'-O-methyladenosine-3'-phosphate
  modified_base 5: mod_base = OTHER; note = 2'-O-methyluridine-3'-phosphate
  modified_base 6: mod_base = OTHER; note = 2'-fluorouridine-3'-phosphate
  modified_base 7: mod_base = OTHER; note = 2'-O-methyluridine-3'-phosphate
  modified_base 8: mod_base = OTHER; note = 2'-fluoroadenosine-3'-phosphate
  modified_base 9: mod_base = OTHER; note = 2'-fluorouridine-3'-phosphate
  modified_base 10: mod_base = OTHER; note = 2'-O-methyladenosine-3'-phosphate
  modified_base 11: mod_base = OTHER; note = 2'-O-methylcytidine-3'-phosphate
  modified_base 12: mod_base = OTHER; note = 2'-O-methyladenosine-3'-phosphate
  modified_base 13: mod_base = OTHER; note = 2'-O-methylcytidine-3'-phosphate
  modified_base 14: mod_base = OTHER; note = 2'-fluorouridine-3'-phosphate
  modified_base 15: mod_base = OTHER; note = 2'-O-methylguanosine-3'-phosphate
  modified_base 16: mod_base = OTHER; note = 2'-fluoroguanosine-3'-phosphate
  modified_base 17: mod_base = OTHER; note = 2'-O-methyladenosine-3'-phosphate
  modified_base 18: mod_base = OTHER; note = 2'-O-methyluridine-3'-phosphate
  modified_base 19: mod_base = OTHER; note = 2'-O-methylcytidine-3'-phosphate
  modified_base 20: mod_base = OTHER; note = 2'-O-methylcytidine-3'-phosphate
  modified_base 21: mod_base = OTHER; note = 2'-O-methylcytidine-3'- phosphorothioate
  modified_base 22: mod_base = OTHER; note = 2'-O-methyladenosine-3'- phosphorothioate
  modified_base 23: mod_base = OTHER; note = 2'-O-methylguanosine-3'-phosphate
tggatttatacactggatcccag

SEQ ID NO: 3835 - RNA, 23 nt, synthetic construct
  source 1..23: mol_type = other RNA
  modified_base 1: mod_base = OTHER; note = 2'-O-methyluridine-3'-phosphorothioate
  modified_base 2: mod_base = OTHER; note = 2'-fluorouridine -3'-phosphorothioate
  modified_base 3: mod_base = OTHER; note = 2'-O-methylcytidine-3'-phosphate
  modified_base 4: mod_base = OTHER; note = 2'-O-methyladenosine-3'-phosphate
  modified_base 5: mod_base = OTHER; note = 2'-O-methylcytidine-3'-phosphate
  modified_base 6: mod_base = OTHER; note = 2'-fluorouridine-3'-phosphate
  modified_base 7: mod_base = OTHER; note = 2'-O-methylguanosine-3'-phosphate
  modified_base 8: mod_base = OTHER; note = 2'-fluorouridine-3'-phosphate
  modified_base 9: mod_base = OTHER; note = 2'-fluorouridine-3'-phosphate
  modified_base 10: mod_base = OTHER; note = 2'-O-methylcytidine-3'-phosphate
  modified_base 11: mod_base = OTHER; note = 2'-O-methyladenosine-3'-phosphate
  modified_base 12: mod_base = OTHER; note = 2'-O-methyladenosine-3'-phosphate
  modified_base 13: mod_base = OTHER; note = 2'-O-methylguanosine-3'-phosphate
  modified_base 14: mod_base = OTHER; note = 2'-fluoroguanosine-3'-phosphate
  modified_base 15: mod_base = OTHER; note = 2'-O-methyluridine-3'-phosphate
  modified_base 16: mod_base = OTHER; note = 2'-fluorouridine-3'-phosphate
  modified_base 17: mod_base = OTHER; note = 2'-O-methyluridine-3'-phosphate
  modified_base 18: mod_base = OTHER; note = 2'-O-methyladenosine-3'-phosphate
  modified_base 19: mod_base = OTHER; note = 2'-O-methyluridine-3'-phosphate
  modified_base 20: mod_base = OTHER; note = 2'-O-methyluridine-3'-phosphate
  modified_base 21: mod_base = OTHER; note = 2'-O-methylguanosine-3'- phosphorothioate
  modified_base 22: mod_base = OTHER; note = 2'-O-methylguanosine-3'- phosphorothioate
  modified_base 23: mod_base = OTHER; note = 2'-O-methylguanosine-3'-phosphate
ttcactgttcaaggtttattggg

SEQ ID NO: 3836 - RNA, 23 nt, synthetic construct
  source 1..23: mol_type = other RNA
  modified_base 1: mod_base = OTHER; note = 2'-O-methyladenosine-3'- phosphorothioate
  modified_base 2: mod_base = OTHER; note = 2'-fluoroadenosine-3'-phosphorothioate
  modified_base 3: mod_base = OTHER; note = 2'-O-methylguanosine-3'-phosphate
  modified_base 4: mod_base = OTHER; note = 2'-O-methyladenosine-3'-phosphate
  modified_base 5: mod_base = OTHER; note = 2'-O-methyluridine-3'-phosphate
  modified_base 6: mod_base = OTHER; note = 2'-fluoroadenosine-3'-phosphate
  modified_base 7: mod_base = OTHER; note = 2'-O-methylcytidine-3'-phosphate
  modified_base 8: mod_base = OTHER; note = 2'-fluorouridine-3'-phosphate
  modified_base 9: mod_base = OTHER; note = 2'-fluoroguanosine-3'-phosphate
  modified_base 10: mod_base = OTHER; note = 2'-O-methyladenosine-3'-phosphate
  modified_base 11: mod_base = OTHER; note = 2'-O-methyluridine-3'-phosphate
  modified_base 12: mod_base = OTHER; note = 2'-O-methylguanosine-3'-phosphate
  modified_base 13: mod_base = OTHER; note = 2'-O-methylguanosine-3'-phosphate
  modified_base 14: mod_base = OTHER; note = 2'-fluorocytidine-3'-phosphate
  modified_base 15: mod_base = OTHER; note = 2'-O-methyladenosine-3'-phosphate
  modified_base 16: mod_base = OTHER; note = 2'-fluorocytidine-3'-phosphate
  modified_base 17: mod_base = OTHER; note = 2'-O-methyladenosine-3'-phosphate
  modified_base 18: mod_base = OTHER; note = 2'-O-methylguanosine-3'-phosphate
  modified_base 19: mod_base = OTHER; note = 2'-O-methylguanosine-3'-phosphate
  modified_base 20: mod_base = OTHER; note = 2'-O-methylcytidine-3'-phosphate
  modified_base 21: mod_base = OTHER; note = 2'-O-methylcytidine-3'- phosphorothioate
  modified_base 22: mod_base = OTHER; note = 2'-O-methyladenosine-3'- phosphorothioate
  modified_base 23: mod_base = OTHER; note = 2'-O-methyluridine-3'-phosphate
aagatactgatggcacaggccat

SEQ ID NO: 3837 - RNA, 23 nt, synthetic construct
  source 1..23: mol_type = other RNA
  modified_base 1: mod_base = OTHER; note = 2'-O-methyluridine-3'-phosphorothioate
  modified_base 2: mod_base = OTHER; note = 2'-fluoroguanosine-3'-phosphorothioate
  modified_base 3: mod_base = OTHER; note = 2'-O-methyluridine-3'-phosphate
  modified_base 4: mod_base = OTHER; note = 2'-O-methylcytidine-3'-phosphate
  modified_base 5: mod_base = OTHER; note = 2'-O-methyluridine-3'-phosphate
  modified_base 6: mod_base = OTHER; note = 2'-fluorouridine-3'-phosphate
  modified_base 7: mod_base = OTHER; note = 2'-O-methylcytidine-3'-phosphate
  modified_base 8: mod_base = OTHER; note = 2'-fluoroguanosine-3'-phosphate
  modified_base 9: mod_base = OTHER; note = 2'-fluoroadenosine-3'-phosphate
  modified_base 10: mod_base = OTHER; note = 2'-O-methyluridine-3'-phosphate
  modified_base 11: mod_base = OTHER; note = 2'-O-methylguanosine-3'-phosphate
  modified_base 12: mod_base = OTHER; note = 2'-O-methyladenosine-3'-phosphate
  modified_base 13: mod_base = OTHER; note = 2'-O-methylcytidine-3'-phosphate
  modified_base 14: mod_base = OTHER; note = 2'-fluoroadenosine-3'-phosphate
  modified_base 15: mod_base = OTHER; note = 2'-O-methyluridine-3'-phosphate
  modified_base 16: mod_base = OTHER; note = 2'-fluorocytidine-3'-phosphate
  modified_base 17: mod_base = OTHER; note = 2'-O-methyladenosine-3'-phosphate
  modified_base 18: mod_base = OTHER; note = 2'-O-methyladenosine-3'-phosphate
  modified_base 19: mod_base = OTHER; note = 2'-O-methylcytidine-3'-phosphate
  modified_base 20: mod_base = OTHER; note = 2'-O-methyladenosine-3'-phosphate
  modified_base 21: mod_base = OTHER; note = 2'-O-methyladenosine-3'- phosphorothioate
  modified_base 22: mod_base = OTHER; note = 2'-O-methylguanosine-3'- phosphorothioate
  modified_base 23: mod_base = OTHER; note = 2'-O-methyladenosine-3'-phosphate
tgtcttcgatgacatcaacaaga

SEQ ID NO: 3838 - RNA, 23 nt, synthetic construct
  source 1..23: mol_type = other RNA
  modified_base 1: mod_base = OTHER; note = 2'-O-methyladenosine-3'- phosphorothioate
  modified_base 2: mod_base = OTHER; note = 2'-fluorouridine -3'-phosphorothioate
  modified_base 3: mod_base = OTHER; note = 2'-O-methyladenosine-3'-phosphate
  modified_base 4: mod_base = OTHER; note = 2'-O-methylguanosine-3'-phosphate
  modified_base 5: mod_base = OTHER; note = 2'-O-methyluridine-3'-phosphate
  modified_base 6: mod_base = OTHER; note = 2'-fluorouridine-3'-phosphate
  modified_base 7: mod_base = OTHER; note = 2'-O-methylcytidine-3'-phosphate
  modified_base 8: mod_base = OTHER; note = 2'-fluoroadenosine-3'-phosphate
  modified_base 9: mod_base = OTHER; note = 2'-fluorocytidine-3'-phosphate
  modified_base 10: mod_base = OTHER; note = 2'-O-methyladenosine-3'-phosphate
  modified_base 11: mod_base = OTHER; note = 2'-O-methyladenosine-3'-phosphate
  modified_base 12: mod_base = OTHER; note = 2'-O-methyladenosine-3'-phosphate
  modified_base 13: mod_base = OTHER; note = 2'-O-methyladenosine-3'-phosphate
  modified_base 14: mod_base = OTHER; note = 2'-fluorouridine-3'-phosphate
  modified_base 15: mod_base = OTHER; note = 2'-O-methyladenosine-3'-phosphate
  modified_base 16: mod_base = OTHER; note = 2'-fluoroadenosine-3'-phosphate
  modified_base 17: mod_base = OTHER; note = 2'-O-methylguanosine-3'-phosphate
  modified_base 18: mod_base = OTHER; note = 2'-O-methyladenosine-3'-phosphate
  modified_base 19: mod_base = OTHER; note = 2'-O-methyluridine-3'-phosphate
  modified_base 20: mod_base = OTHER; note = 2'-O-methylcytidine-3'-phosphate
  modified_base 21: mod_base = OTHER; note = 2'-O-methylcytidine-3'- phosphorothioate
  modified_base 22: mod_base = OTHER; note = 2'-O-methyluridine-3'-phosphorothioate
  modified_base 23: mod_base = OTHER; note = 2'-O-methyluridine-3'-phosphate
atagttcacaaaataagatcctt

SEQ ID NO: 3839 - RNA, 23 nt, synthetic construct
  source 1..23: mol_type = other RNA
  modified_base 1: mod_base = OTHER; note = 2'-O-methyladenosine-3'- phosphorothioate
  modified_base 2: mod_base = OTHER; note = 2'-fluoroguanosine-3'-phosphorothioate
  modified_base 3: mod_base = OTHER; note = 2'-O-methyluridine-3'-phosphate
  modified_base 4: mod_base = OTHER; note = 2'-O-methyluridine-3'-phosphate
  modified_base 5: mod_base = OTHER; note = 2'-O-methylcytidine-3'-phosphate
  modified_base 6: mod_base = OTHER; note = 2'-fluoroadenosine-3'-phosphate
  modified_base 7: mod_base = OTHER; note = 2'-O-methylcytidine-3'-phosphate
  modified_base 8: mod_base = OTHER; note = 2'-fluoroadenosine-3'-phosphate
  modified_base 9: mod_base = OTHER; note = 2'-fluoroadenosine-3'-phosphate
  modified_base 10: mod_base = OTHER; note = 2'-O-methyladenosine-3'-phosphate
  modified_base 11: mod_base = OTHER; note = 2'-O-methyladenosine-3'-phosphate
  modified_base 12: mod_base = OTHER; note = 2'-O-methyluridine-3'-phosphate
  modified_base 13: mod_base = OTHER; note = 2'-O-methyladenosine-3'-phosphate
  modified_base 14: mod_base = OTHER; note = 2'-fluoroadenosine-3'-phosphate
  modified_base 15: mod_base = OTHER; note = 2'-O-methylguanosine-3'-phosphate
  modified_base 16: mod_base = OTHER; note = 2'-fluoroadenosine-3'-phosphate
  modified_base 17: mod_base = OTHER; note = 2'-O-methyluridine-3'-phosphate
  modified_base 18: mod_base = OTHER; note = 2'-O-methylcytidine-3'-phosphate
  modified_base 19: mod_base = OTHER; note = 2'-O-methylcytidine-3'-phosphate
  modified_base 20: mod_base = OTHER; note = 2'-O-methyluridine-3'-phosphate
  modified_base 21: mod_base = OTHER; note = 2'-O-methyluridine-3'-phosphorothioate
  modified_base 22: mod_base = OTHER; note = 2'-O-methyluridine-3'-phosphorothioate
  modified_base 23: mod_base = OTHER; note = 2'-O-methylguanosine-3'-phosphate
agttcacaaaataagatcctttg

SEQ ID NO: 3840 - RNA, 23 nt, synthetic construct
  source 1..23: mol_type = other RNA
  modified_base 1: mod_base = OTHER; note = 2'-O-methyluridine-3'-phosphorothioate
  modified_base 2: mod_base = OTHER; note = 2'-fluoroadenosine-3'-phosphorothioate
  modified_base 3: mod_base = OTHER; note = 2'-O-methyladenosine-3'-phosphate
  modified_base 4: mod_base = OTHER; note = 2'-O-methyluridine-3'-phosphate
  modified_base 5: mod_base = OTHER; note = 2'-O-methyluridine-3'-phosphate
  modified_base 6: mod_base = OTHER; note = 2'-fluoroadenosine-3'-phosphate
  modified_base 7: mod_base = OTHER; note = 2'-O-methyluridine-3'-phosphate
  modified_base 8: mod_base = OTHER; note = 2'-fluoroguanosine-3'-phosphate
  modified_base 9: mod_base = OTHER; note = 2'-fluorocytidine-3'-phosphate
  modified_base 10: mod_base = OTHER; note = 2'-O-methyladenosine-3'-phosphate
  modified_base 11: mod_base = OTHER; note = 2'-O-methylcytidine-3'-phosphate
  modified_base 12: mod_base = OTHER; note = 2'-O-methyladenosine-3'-phosphate
  modified_base 13: mod_base = OTHER; note = 2'-O-methyladenosine-3'-phosphate
  modified_base 14: mod_base = OTHER; note = 2'-fluoroguanosine-3'-phosphate
  modified_base 15: mod_base = OTHER; note = 2'-O-methyladenosine-3'-phosphate
  modified_base 16: mod_base = OTHER; note = 2'-fluorocytidine-3'-phosphate
  modified_base 17: mod_base = OTHER; note = 2'-O-methyladenosine-3'-phosphate
  modified_base 18: mod_base = OTHER; note = 2'-O-methyluridine-3'-phosphate
  modified_base 19: mod_base = OTHER; note = 2'-O-methylguanosine-3'-phosphate
  modified_base 20: mod_base = OTHER; note = 2'-O-methyladenosine-3'-phosphate
  modified_base 21: mod_base = OTHER; note = 2'-O-methyluridine-3'-phosphorothioate
  modified_base 22: mod_base = OTHER; note = 2'-O-methyladenosine-3'- phosphorothioate
  modified_base 23: mod_base = OTHER; note = 2'-O-methyluridine-3'-phosphate
taattatgcacaagacatgatat

SEQ ID NO: 3841 - RNA, 23 nt, synthetic construct
  source 1..23: mol_type = other RNA
  modified_base 1: mod_base = OTHER; note = 2'-O-methyladenosine-3'- phosphorothioate
  modified_base 2: mod_base = OTHER; note = 2'-fluoroguanosine-3'-phosphorothioate
  modified_base 3: mod_base = OTHER; note = 2'-O-methyladenosine-3'-phosphate
  modified_base 4: mod_base = OTHER; note = 2'-O-methylcytidine-3'-phosphate
  modified_base 5: mod_base = OTHER; note = 2'-O-methyladenosine-3'-phosphate
  modified_base 6: mod_base = OTHER; note = 2'-fluoroguanosine-3'-phosphate
  modified_base 7: mod_base = OTHER; note = 2'-O-methyluridine-3'-phosphate
  modified_base 8: mod_base = OTHER; note = 2'-fluoroguanosine-3'-phosphate
  modified_base 9: mod_base = OTHER; note = 2'-fluoroadenosine-3'-phosphate
  modified_base 10: mod_base = OTHER; note = 2'-O-methyladenosine-3'-phosphate
  modified_base 11: mod_base = OTHER; note = 2'-O-methyladenosine-3'-phosphate
  modified_base 12: mod_base = OTHER; note = 2'-O-methyluridine-3'-phosphate
  modified_base 13: mod_base = OTHER; note = 2'-O-methylguanosine-3'-phosphate
  modified_base 14: mod_base = OTHER; note = 2'-fluoroadenosine-3'-phosphate
  modified_base 15: mod_base = OTHER; note = 2'-O-methyluridine-3'-phosphate
  modified_base 16: mod_base = OTHER; note = 2'-fluoroadenosine-3'-phosphate
  modified_base 17: mod_base = OTHER; note = 2'-O-methyluridine-3'-phosphate
  modified_base 18: mod_base = OTHER; note = 2'-O-methylguanosine-3'-phosphate
  modified_base 19: mod_base = OTHER; note = 2'-O-methyladenosine-3'-phosphate
  modified_base 20: mod_base = OTHER; note = 2'-O-methylcytidine-3'-phosphate
  modified_base 21: mod_base = OTHER; note = 2'-O-methyladenosine-3'- phosphorothioate
  modified_base 22: mod_base = OTHER; note = 2'-O-methyluridine-3'-phosphorothioate
  modified_base 23: mod_base = OTHER; note = 2'-O-methylcytidine-3'-phosphate
agacagtgaaatgatatgacatc

SEQ ID NO: 3842 - RNA, 23 nt, synthetic construct
  source 1..23: mol_type = other RNA
  modified_base 1: mod_base = OTHER; note = 2'-O-methyluridine-3'-phosphorothioate
  modified_base 2: mod_base = OTHER; note = 2'-fluorouridine -3'-phosphorothioate
  modified_base 3: mod_base = OTHER; note = 2'-O-methyladenosine-3'-phosphate
  modified_base 4: mod_base = OTHER; note = 2'-O-methylguanosine-3'-phosphate
  modified_base 5: mod_base = OTHER; note = 2'-O-methyladenosine-3'-phosphate
  modified_base 6: mod_base = OTHER; note = 2'-fluorocytidine-3'-phosphate
  modified_base 7: mod_base = OTHER; note = 2'-O-methyladenosine-3'-phosphate
  modified_base 8: mod_base = OTHER; note = 2'-fluoroguanosine-3'-phosphate
  modified_base 9: mod_base = OTHER; note = 2'-fluorouridine-3'-phosphate
  modified_base 10: mod_base = OTHER; note = 2'-O-methylguanosine-3'-phosphate
  modified_base 11: mod_base = OTHER; note = 2'-O-methyladenosine-3'-phosphate
  modified_base 12: mod_base = OTHER; note = 2'-O-methyladenosine-3'-phosphate
  modified_base 13: mod_base = OTHER; note = 2'-O-methyladenosine-3'-phosphate
  modified_base 14: mod_base = OTHER; note = 2'-fluorouridine-3'-phosphate
  modified_base 15: mod_base = OTHER; note = 2'-O-methylguanosine-3'-phosphate
  modified_base 16: mod_base = OTHER; note = 2'-fluoroadenosine-3'-phosphate
  modified_base 17: mod_base = OTHER; note = 2'-O-methyluridine-3'-phosphate
  modified_base 18: mod_base = OTHER; note = 2'-O-methyladenosine-3'-phosphate
  modified_base 19: mod_base = OTHER; note = 2'-O-methyluridine-3'-phosphate
  modified_base 20: mod_base = OTHER; note = 2'-O-methylguanosine-3'-phosphate
  modified_base 21: mod_base = OTHER; note = 2'-O-methyladenosine-3'- phosphorothioate
  modified_base 22: mod_base = OTHER; note = 2'-O-methylcytidine-3'- phosphorothioate
  modified_base 23: mod_base = OTHER; note = 2'-O-methyladenosine-3'-phosphate
ttagacagtgaaatgatatgaca

SEQ ID NO: 3843 - RNA, 23 nt, synthetic construct
  source 1..23: mol_type = other RNA
  modified_base 1: mod_base = OTHER; note = 2'-O-methyluridine-3'-phosphorothioate
  modified_base 2: mod_base = OTHER; note = 2'-fluorouridine -3'-phosphorothioate
  modified_base 3: mod_base = OTHER; note = 2'-O-methylcytidine-3'-phosphate
  modified_base 4: mod_base = OTHER; note = 2'-O-methylcytidine-3'-phosphate
  modified_base 5: mod_base = OTHER; note = 2'-O-methyluridine-3'-phosphate
  modified_base 6: mod_base = OTHER; note = 2'-fluorouridine-3'-phosphate
  modified_base 7: mod_base = OTHER; note = 2'-O-methyluridine-3'-phosphate
  modified_base 8: mod_base = OTHER; note = 2'-fluoroadenosine-3'-phosphate
  modified_base 9: mod_base = OTHER; note = 2'-fluoroguanosine-3'-phosphate
  modified_base 10: mod_base = OTHER; note = 2'-O-methyladenosine-3'-phosphate
  modified_base 11: mod_base = OTHER; note = 2'-O-methyladenosine-3'-phosphate
  modified_base 12: mod_base = OTHER; note = 2'-O-methylguanosine-3'-phosphate
  modified_base 13: mod_base = OTHER; note = 2'-O-methyladenosine-3'-phosphate
  modified_base 14: mod_base = OTHER; note = 2'-fluorouridine-3'-phosphate
  modified_base 15: mod_base = OTHER; note = 2'-O-methyluridine-3'-phosphate
  modified_base 16: mod_base = OTHER; note = 2'-fluoroadenosine-3'-phosphate
  modified_base 17: mod_base = OTHER; note = 2'-O-methyluridine-3'-phosphate
  modified_base 18: mod_base = OTHER; note = 2'-O-methyladenosine-3'-phosphate
  modified_base 19: mod_base = OTHER; note = 2'-O-methyladenosine-3'-phosphate
  modified_base 20: mod_base = OTHER; note = 2'-O-methyladenosine-3'-phosphate
  modified_base 21: mod_base = OTHER; note = 2'-O-methyluridine-3'-phosphorothioate
  modified_base 22: mod_base = OTHER; note = 2'-O-methylcytidine-3'- phosphorothioate
  modified_base 23: mod_base = OTHER; note = 2'-O-methyladenosine-3'-phosphate
ttcctttagaagattataaatca

SEQ ID NO: 3844 - RNA, 23 nt, synthetic construct
  source 1..23: mol_type = other RNA
  modified_base 1: mod_base = OTHER; note = 2'-O-methyladenosine-3'- phosphorothioate
  modified_base 2: mod_base = OTHER; note = 2'-fluoroguanosine-3'-phosphorothioate
  modified_base 3: mod_base = OTHER; note = 2'-O-methylcytidine-3'-phosphate
  modified_base 4: mod_base = OTHER; note = 2'-O-methyluridine-3'-phosphate
  modified_base 5: mod_base = OTHER; note = 2'-O-methylguanosine-3'-phosphate
  modified_base 6: mod_base = OTHER; note = 2'-fluorouridine-3'-phosphate
  modified_base 7: mod_base = OTHER; note = 2'-O-methylguanosine-3'-phosphate
  modified_base 8: mod_base = OTHER; note = 2'-fluoroguanosine-3'-phosphate
  modified_base 9: mod_base = OTHER; note = 2'-fluoroadenosine-3'-phosphate
  modified_base 10: mod_base = OTHER; note = 2'-O-methyluridine-3'-phosphate
  modified_base 11: mod_base = OTHER; note = 2'-O-methyluridine-3'-phosphate
  modified_base 12: mod_base = OTHER; note = 2'-O-methyluridine-3'-phosphate
  modified_base 13: mod_base = OTHER; note = 2'-O-methyluridine-3'-phosphate
  modified_base 14: mod_base = OTHER; note = 2'-fluoroadenosine-3'-phosphate
  modified_base 15: mod_base = OTHER; note = 2'-O-methylcytidine-3'-phosphate
  modified_base 16: mod_base = OTHER; note = 2'-fluoroadenosine-3'-phosphate
  modified_base 17: mod_base = OTHER; note = 2'-O-methyladenosine-3'-phosphate
  modified_base 18: mod_base = OTHER; note = 2'-O-methyladenosine-3'-phosphate
  modified_base 19: mod_base = OTHER; note = 2'-O-methylcytidine-3'-phosphate
  modified_base 20: mod_base = OTHER; note = 2'-O-methylcytidine-3'-phosphate
  modified_base 21: mod_base = OTHER; note = 2'-O-methyladenosine-3'- phosphorothioate
  modified_base 22: mod_base = OTHER; note = 2'-O-methyluridine-3'-phosphorothioate
  modified_base 23: mod_base = OTHER; note = 2'-O-methyluridine-3'-phosphate
agctgtggattttacaaaccatt

SEQ ID NO: 3845 - RNA, 23 nt, synthetic construct
  source 1..23: mol_type = other RNA
  modified_base 1: mod_base = OTHER; note = 2'-O-methyladenosine-3'- phosphorothioate
  modified_base 2: mod_base = OTHER; note = 2'-fluoroadenosine-3'-phosphorothioate
  modified_base 3: mod_base = OTHER; note = 2'-O-methylguanosine-3'-phosphate
  modified_base 4: mod_base = OTHER; note = 2'-O-methyladenosine-3'-phosphate
  modified_base 5: mod_base = OTHER; note = 2'-O-methyluridine-3'-phosphate
  modified_base 6: mod_base = OTHER; note = 2'-fluorouridine-3'-phosphate
  modified_base 7: mod_base = OTHER; note = 2'-O-methyladenosine-3'-phosphate
  modified_base 8: mod_base = OTHER; note = 2'-fluoroadenosine-3'-phosphate
  modified_base 9: mod_base = OTHER; note = 2'-fluorouridine-3'-phosphate
  modified_base 10: mod_base = OTHER; note = 2'-O-methyladenosine-3'-phosphate
  modified_base 11: mod_base = OTHER; note = 2'-O-methylcytidine-3'-phosphate
  modified_base 12: mod_base = OTHER; note = 2'-O-methylcytidine-3'-phosphate
  modified_base 13: mod_base = OTHER; note = 2'-O-methyladenosine-3'-phosphate
  modified_base 14: mod_base = OTHER; note = 2'-fluorouridine-3'-phosphate
  modified_base 15: mod_base = OTHER; note = 2'-O-methylcytidine-3'-phosphate
  modified_base 16: mod_base = OTHER; note = 2'-fluorocytidine-3'-phosphate
  modified_base 17: mod_base = OTHER; note = 2'-O-methyladenosine-3'-phosphate
  modified_base 18: mod_base = OTHER; note = 2'-O-methylguanosine-3'-phosphate
  modified_base 19: mod_base = OTHER; note = 2'-O-methylcytidine-3'-phosphate
  modified_base 20: mod_base = OTHER; note = 2'-O-methyladenosine-3'-phosphate
  modified_base 21: mod_base = OTHER; note = 2'-O-methyluridine-3'-phosphorothioate
  modified_base 22: mod_base = OTHER; note = 2'-O-methylcytidine-3'- phosphorothioate
  modified_base 23: mod_base = OTHER; note = 2'-O-methyladenosine-3'-phosphate
aagattaataccatccagcatca

SEQ ID NO: 3846 - RNA, 23 nt, synthetic construct
  source 1..23: mol_type = other RNA
  modified_base 1: mod_base = OTHER; note = 2'-O-methyladenosine-3'- phosphorothioate
  modified_base 2: mod_base = OTHER; note = 2'-fluorouridine -3'-phosphorothioate
  modified_base 3: mod_base = OTHER; note = 2'-O-methylguanosine-3'-phosphate
  modified_base 4: mod_base = OTHER; note = 2'-O-methyluridine-3'-phosphate
  modified_base 5: mod_base = OTHER; note = 2'-O-methyladenosine-3'-phosphate
  modified_base 6: mod_base = OTHER; note = 2'-fluorocytidine-3'-phosphate
  modified_base 7: mod_base = OTHER; note = 2'-O-methyladenosine-3'-phosphate
  modified_base 8: mod_base = OTHER; note = 2'-fluorocytidine-3'-phosphate
  modified_base 9: mod_base = OTHER; note = 2'-fluorouridine-3'-phosphate
  modified_base 10: mod_base = OTHER; note = 2'-O-methyladenosine-3'-phosphate
  modified_base 11: mod_base = OTHER; note = 2'-O-methylcytidine-3'-phosphate
  modified_base 12: mod_base = OTHER; note = 2'-O-methyluridine-3'-phosphate
  modified_base 13: mod_base = OTHER; note = 2'-O-methylguanosine-3'-phosphate
  modified_base 14: mod_base = OTHER; note = 2'-fluoroadenosine-3'-phosphate
  modified_base 15: mod_base = OTHER; note = 2'-O-methyluridine-3'-phosphate
  modified_base 16: mod_base = OTHER; note = 2'-fluoroadenosine-3'-phosphate
  modified_base 17: mod_base = OTHER; note = 2'-O-methyluridine-3'-phosphate
  modified_base 18: mod_base = OTHER; note = 2'-O-methyladenosine-3'-phosphate
  modified_base 19: mod_base = OTHER; note = 2'-O-methylguanosine-3'-phosphate
  modified_base 20: mod_base = OTHER; note = 2'-O-methyluridine-3'-phosphate
  modified_base 21: mod_base = OTHER; note = 2'-O-methyluridine-3'-phosphorothioate
  modified_base 22: mod_base = OTHER; note = 2'-O-methylcytidine-3'- phosphorothioate
  modified_base 23: mod_base = OTHER; note = 2'-O-methyladenosine-3'-phosphate
atgtacactactgatatagttca

SEQ ID NO: 3847 - RNA, 23 nt, synthetic construct
  source 1..23: mol_type = other RNA
  modified_base 1: mod_base = OTHER; note = 2'-O-methyluridine-3'-phosphorothioate
  modified_base 2: mod_base = OTHER; note = 2'-fluorouridine -3'-phosphorothioate
  modified_base 3: mod_base = OTHER; note = 2'-O-methyluridine-3'-phosphate
  modified_base 4: mod_base = OTHER; note = 2'-O-methylcytidine-3'-phosphate
  modified_base 5: mod_base = OTHER; note = 2'-O-methyluridine-3'-phosphate
  modified_base 6: mod_base = OTHER; note = 2'-fluoroadenosine-3'-phosphate
  modified_base 7: mod_base = OTHER; note = 2'-O-methyladenosine-3'-phosphate
  modified_base 8: mod_base = OTHER; note = 2'-fluorocytidine-3'-phosphate
  modified_base 9: mod_base = OTHER; note = 2'-fluorouridine-3'-phosphate
  modified_base 10: mod_base = OTHER; note = 2'-O-methyluridine-3'-phosphate
  modified_base 11: mod_base = OTHER; note = 2'-O-methylcytidine-3'-phosphate
  modified_base 12: mod_base = OTHER; note = 2'-O-methyladenosine-3'-phosphate
  modified_base 13: mod_base = OTHER; note = 2'-O-methylguanosine-3'-phosphate
  modified_base 14: mod_base = OTHER; note = 2'-fluoroguanosine-3'-phosphate
  modified_base 15: mod_base = OTHER; note = 2'-O-methyladenosine-3'-phosphate
  modified_base 16: mod_base = OTHER; note = 2'-fluoroguanosine-3'-phosphate
  modified_base 17: mod_base = OTHER; note = 2'-O-methyluridine-3'-phosphate
  modified_base 18: mod_base = OTHER; note = 2'-O-methyluridine-3'-phosphate
  modified_base 19: mod_base = OTHER; note = 2'-O-methylguanosine-3'-phosphate
  modified_base 20: mod_base = OTHER; note = 2'-O-methyladenosine-3'-phosphate
  modified_base 21: mod_base = OTHER; note = 2'-O-methyluridine-3'-phosphorothioate
  modified_base 22: mod_base = OTHER; note = 2'-O-methylguanosine-3'- phosphorothioate
  modified_base 23: mod_base = OTHER; note = 2'-O-methyluridine-3'-phosphate
tttctaacttcaggagttgatgt

SEQ ID NO: 3848 - RNA, 23 nt, synthetic construct
  source 1..23: mol_type = other RNA
  modified_base 1: mod_base = OTHER; note = 2'-O-methyluridine-3'-phosphorothioate
  modified_base 2: mod_base = OTHER; note = 2'-fluoroadenosine-3'-phosphorothioate
  modified_base 3: mod_base = OTHER; note = 2'-O-methylcytidine-3'-phosphate
  modified_base 4: mod_base = OTHER; note = 2'-O-methyladenosine-3'-phosphate
  modified_base 5: mod_base = OTHER; note = 2'-O-methyladenosine-3'-phosphate
  modified_base 6: mod_base = OTHER; note = 2'-fluoroguanosine-3'-phosphate
  modified_base 7: mod_base = OTHER; note = 2'-O-methyladenosine-3'-phosphate
  modified_base 8: mod_base = OTHER; note = 2'-fluorouridine-3'-phosphate
  modified_base 9: mod_base = OTHER; note = 2'-fluorouridine-3'-phosphate
  modified_base 10: mod_base = OTHER; note = 2'-O-methyladenosine-3'-phosphate
  modified_base 11: mod_base = OTHER; note = 2'-O-methyladenosine-3'-phosphate
  modified_base 12: mod_base = OTHER; note = 2'-O-methyluridine-3'-phosphate
  modified_base 13: mod_base = OTHER; note = 2'-O-methyladenosine-3'-phosphate
  modified_base 14: mod_base = OTHER; note = 2'-fluorocytidine-3'-phosphate
  modified_base 15: mod_base = OTHER; note = 2'-O-methylcytidine-3'-phosphate
  modified_base 16: mod_base = OTHER; note = 2'-fluoroadenosine-3'-phosphate
  modified_base 17: mod_base = OTHER; note = 2'-O-methyluridine-3'-phosphate
  modified_base 18: mod_base = OTHER; note = 2'-O-methylcytidine-3'-phosphate
  modified_base 19: mod_base = OTHER; note = 2'-O-methylcytidine-3'-phosphate
  modified_base 20: mod_base = OTHER; note = 2'-O-methyladenosine-3'-phosphate
  modified_base 21: mod_base = OTHER; note = 2'-O-methylguanosine-3'- phosphorothioate
  modified_base 22: mod_base = OTHER; note = 2'-O-methylcytidine-3'- phosphorothioate
  modified_base 23: mod_base = OTHER; note = 2'-O-methyladenosine-3'-phosphate
tacaagattaataccatccagca

SEQ ID NO: 3849 - RNA, 23 nt, synthetic construct
  source 1..23: mol_type = other RNA
  modified_base 1: mod_base = OTHER; note = 2'-O-methyladenosine-3'- phosphorothioate
  modified_base 2: mod_base = OTHER; note = 2'-fluoroguanosine-3'-phosphorothioate
  modified_base 3: mod_base = OTHER; note = 2'-O-methylcytidine-3'-phosphate
  modified_base 4: mod_base = OTHER; note = 2'-O-methylcytidine-3'-phosphate
  modified_base 5: mod_base = OTHER; note = 2'-O-methyluridine-3'-phosphate
  modified_base 6: mod_base = OTHER; note = 2'-fluoroadenosine-3'-phosphate
  modified_base 7: mod_base = OTHER; note = 2'-O-methylguanosine-3'-phosphate
  modified_base 8: mod_base = OTHER; note = 2'-fluoroadenosine-3'-phosphate
  modified_base 9: mod_base = OTHER; note = 2'-fluorocytidine-3'-phosphate
  modified_base 10: mod_base = OTHER; note = 2'-O-methyladenosine-3'-phosphate
  modified_base 11: mod_base = OTHER; note = 2'-O-methylguanosine-3'-phosphate
  modified_base 12: mod_base = OTHER; note = 2'-O-methyluridine-3'-phosphate
  modified_base 13: mod_base = OTHER; note = 2'-O-methylguanosine-3'-phosphate
  modified_base 14: mod_base = OTHER; note = 2'-fluoroadenosine-3'-phosphate
  modified_base 15: mod_base = OTHER; note = 2'-O-methyladenosine-3'-phosphate
  modified_base 16: mod_base = OTHER; note = 2'-fluoroadenosine-3'-phosphate
  modified_base 17: mod_base = OTHER; note = 2'-O-methyluridine-3'-phosphate
  modified_base 18: mod_base = OTHER; note = 2'-O-methylguanosine-3'-phosphate
  modified_base 19: mod_base = OTHER; note = 2'-O-methyladenosine-3'-phosphate
  modified_base 20: mod_base = OTHER; note = 2'-O-methyluridine-3'-phosphate
  modified_base 21: mod_base = OTHER; note = 2'-O-methyladenosine-3'- phosphorothioate
  modified_base 22: mod_base = OTHER; note = 2'-O-methyluridine-3'-phosphorothioate
  modified_base 23: mod_base = OTHER; note = 2'-O-methylguanosine-3'-phosphate
agcctagacagtgaaatgatatg

SEQ ID NO: 3850 - RNA, 23 nt, synthetic construct
  source 1..23: mol_type = other RNA
  modified_base 1: mod_base = OTHER; note = 2'-O-methyluridine-3'-phosphorothioate
  modified_base 2: mod_base = OTHER; note = 2'-fluoroguanosine-3'-phosphorothioate
  modified_base 3: mod_base = OTHER; note = 2'-O-methyladenosine-3'-phosphate
  modified_base 4: mod_base = OTHER; note = 2'-O-methyluridine-3'-phosphate
  modified_base 5: mod_base = OTHER; note = 2'-O-methyladenosine-3'-phosphate
  modified_base 6: mod_base = OTHER; note = 2'-fluorouridine-3'-phosphate
  modified_base 7: mod_base = OTHER; note = 2'-O-methyladenosine-3'-phosphate
  modified_base 8: mod_base = OTHER; note = 2'-fluoroguanosine-3'-phosphate
  modified_base 9: mod_base = OTHER; note = 2'-fluorocytidine-3'-phosphate
  modified_base 10: mod_base = OTHER; note = 2'-O-methyluridine-3'-phosphate
  modified_base 11: mod_base = OTHER; note = 2'-O-methylguanosine-3'-phosphate
  modified_base 12: mod_base = OTHER; note = 2'-O-methyluridine-3'-phosphate
  modified_base 13: mod_base = OTHER; note = 2'-O-methylguanosine-3'-phosphate
  modified_base 14: mod_base = OTHER; note = 2'-fluoroguanosine-3'-phosphate
  modified_base 15: mod_base = OTHER; note = 2'-O-methyladenosine-3'-phosphate
  modified_base 16: mod_base = OTHER; note = 2'-fluorouridine-3'-phosphate
  modified_base 17: mod_base = OTHER; note = 2'-O-methyluridine-3'-phosphate
  modified_base 18: mod_base = OTHER; note = 2'-O-methyluridine-3'-phosphate
  modified_base 19: mod_base = OTHER; note = 2'-O-methyluridine-3'-phosphate
  modified_base 20: mod_base = OTHER; note = 2'-O-methyladenosine-3'-phosphate
  modified_base 21: mod_base = OTHER; note = 2'-O-methylcytidine-3'- phosphorothioate
  modified_base 22: mod_base = OTHER; note = 2'-O-methyladenosine-3'- phosphorothioate
  modified_base 23: mod_base = OTHER; note = 2'-O-methyladenosine-3'-phosphate
tgatatagctgtggattttacaa

SEQ ID NO: 3851 - RNA, 23 nt, synthetic construct
  source 1..23: mol_type = other RNA
  modified_base 1: mod_base = OTHER; note = 2'-O-methyladenosine-3'- phosphorothioate
  modified_base 2: mod_base = OTHER; note = 2'-fluoroadenosine-3'-phosphorothioate
  modified_base 3: mod_base = OTHER; note = 2'-O-methyladenosine-3'-phosphate
  modified_base 4: mod_base = OTHER; note = 2'-O-methyluridine-3'-phosphate
  modified_base 5: mod_base = OTHER; note = 2'-O-methylguanosine-3'-phosphate
  modified_base 6: mod_base = OTHER; note = 2'-fluorocytidine-3'-phosphate
  modified_base 7: mod_base = OTHER; note = 2'-O-methyladenosine-3'-phosphate
  modified_base 8: mod_base = OTHER; note = 2'-fluoroadenosine-3'-phosphate
  modified_base 9: mod_base = OTHER; note = 2'-fluoroguanosine-3'-phosphate
  modified_base 10: mod_base = OTHER; note = 2'-O-methylguanosine-3'-phosphate
  modified_base 11: mod_base = OTHER; note = 2'-O-methyladenosine-3'-phosphate
  modified_base 12: mod_base = OTHER; note = 2'-O-methyladenosine-3'-phosphate
  modified_base 13: mod_base = OTHER; note = 2'-O-methylcytidine-3'-phosphate
  modified_base 14: mod_base = OTHER; note = 2'-fluoroadenosine-3'-phosphate
  modified_base 15: mod_base = OTHER; note = 2'-O-methylcytidine-3'-phosphate
  modified_base 16: mod_base = OTHER; note = 2'-fluorouridine-3'-phosphate
  modified_base 17: mod_base = OTHER; note = 2'-O-methyladenosine-3'-phosphate
  modified_base 18: mod_base = OTHER; note = 2'-O-methyladenosine-3'-phosphate
  modified_base 19: mod_base = OTHER; note = 2'-O-methylguanosine-3'-phosphate
  modified_base 20: mod_base = OTHER; note = 2'-O-methylguanosine-3'-phosphate
  modified_base 21: mod_base = OTHER; note = 2'-O-methyladenosine-3'- phosphorothioate
  modified_base 22: mod_base = OTHER; note = 2'-O-methyladenosine-3'- phosphorothioate
  modified_base 23: mod_base = OTHER; note = 2'-O-methylguanosine-3'-phosphate
aaatgcaaggaacactaaggaag

SEQ ID NO: 3852 - RNA, 23 nt, synthetic construct
  source 1..23: mol_type = other RNA
  modified_base 1: mod_base = OTHER; note = 2'-O-methyluridine-3'-phosphorothioate
  modified_base 2: mod_base = OTHER; note = 2'-fluorocytidine-3'-phosphorothioate
  modified_base 3: mod_base = OTHER; note = 2'-O-methyluridine-3'-phosphate
  modified_base 4: mod_base = OTHER; note = 2'-O-methyladenosine-3'-phosphate
  modified_base 5: mod_base = OTHER; note = 2'-O-methylguanosine-3'-phosphate
  modified_base 6: mod_base = OTHER; note = 2'-fluoroadenosine-3'-phosphate
  modified_base 7: mod_base = OTHER; note = 2'-O-methylcytidine-3'-phosphate
  modified_base 8: mod_base = OTHER; note = 2'-fluoroadenosine-3'-phosphate
  modified_base 9: mod_base = OTHER; note = 2'-fluoroguanosine-3'-phosphate
  modified_base 10: mod_base = OTHER; note = 2'-O-methyluridine-3'-phosphate
  modified_base 11: mod_base = OTHER; note = 2'-O-methylguanosine-3'-phosphate
  modified_base 12: mod_base = OTHER; note = 2'-O-methyladenosine-3'-phosphate
  modified_base 13: mod_base = OTHER; note = 2'-O-methyladenosine-3'-phosphate
  modified_base 14: mod_base = OTHER; note = 2'-fluoroadenosine-3'-phosphate
  modified_base 15: mod_base = OTHER; note = 2'-O-methyluridine-3'-phosphate
  modified_base 16: mod_base = OTHER; note = 2'-fluoroguanosine-3'-phosphate
  modified_base 17: mod_base = OTHER; note = 2'-O-methyladenosine-3'-phosphate
  modified_base 18: mod_base = OTHER; note = 2'-O-methyluridine-3'-phosphate
  modified_base 19: mod_base = OTHER; note = 2'-O-methyladenosine-3'-phosphate
  modified_base 20: mod_base = OTHER; note = 2'-O-methyluridine-3'-phosphate
  modified_base 21: mod_base = OTHER; note = 2'-O-methylguanosine-3'- phosphorothioate
  modified_base 22: mod_base = OTHER; note = 2'-O-methyladenosine-3'- phosphorothioate
  modified_base 23: mod_base = OTHER; note = 2'-O-methylcytidine-3'-phosphate
tctagacagtgaaatgatatgac

SEQ ID NO: 3853 - RNA, 23 nt, synthetic construct
  source 1..23: mol_type = other RNA
  modified_base 1: mod_base = OTHER; note = 2'-O-methyluridine-3'-phosphorothioate
  modified_base 2: mod_base = OTHER; note = 2'-fluorouridine -3'-phosphorothioate
  modified_base 3: mod_base = OTHER; note = 2'-O-methyladenosine-3'-phosphate
  modified_base 4: mod_base = OTHER; note = 2'-O-methyladenosine-3'-phosphate
  modified_base 5: mod_base = OTHER; note = 2'-O-methylcytidine-3'-phosphate
  modified_base 6: mod_base = OTHER; note = 2'-fluorouridine-3'-phosphate
  modified_base 7: mod_base = OTHER; note = 2'-O-methyluridine-3'-phosphate
  modified_base 8: mod_base = OTHER; note = 2'-fluorocytidine-3'-phosphate
  modified_base 9: mod_base = OTHER; note = 2'-fluoroadenosine-3'-phosphate
  modified_base 10: mod_base = OTHER; note = 2'-O-methylguanosine-3'-phosphate
  modified_base 11: mod_base = OTHER; note = 2'-O-methylguanosine-3'-phosphate
  modified_base 12: mod_base = OTHER; note = 2'-O-methyladenosine-3'-phosphate
  modified_base 13: mod_base = OTHER; note = 2'-O-methylguanosine-3'-phosphate
  modified_base 14: mod_base = OTHER; note = 2'-fluorouridine-3'-phosphate
  modified_base 15: mod_base = OTHER; note = 2'-O-methyluridine-3'-phosphate
  modified_base 16: mod_base = OTHER; note = 2'-fluoroguanosine-3'-phosphate
  modified_base 17: mod_base = OTHER; note = 2'-O-methyladenosine-3'-phosphate
  modified_base 18: mod_base = OTHER; note = 2'-O-methyluridine-3'-phosphate
  modified_base 19: mod_base = OTHER; note = 2'-O-methylguanosine-3'-phosphate
  modified_base 20: mod_base = OTHER; note = 2'-O-methyluridine-3'-phosphate
  modified_base 21: mod_base = OTHER; note = 2'-O-methyluridine-3'-phosphorothioate
  modified_base 22: mod_base = OTHER; note = 2'-O-methyluridine-3'-phosphorothioate
  modified_base 23: mod_base = OTHER; note = 2'-O-methyluridine-3'-phosphate
ttaacttcaggagttgatgtttt

SEQ ID NO: 3854 - RNA, 23 nt, synthetic construct
  source 1..23: mol_type = other RNA
  modified_base 1: mod_base = OTHER; note = 2'-O-methyluridine-3'-phosphorothioate
  modified_base 2: mod_base = OTHER; note = 2'-fluorouridine -3'-phosphorothioate
  modified_base 3: mod_base = OTHER; note = 2'-O-methyladenosine-3'-phosphate
  modified_base 4: mod_base = OTHER; note = 2'-O-methyladenosine-3'-phosphate
  modified_base 5: mod_base = OTHER; note = 2'-O-methyluridine-3'-phosphate
  modified_base 6: mod_base = OTHER; note = 2'-fluoroadenosine-3'-phosphate
  modified_base 7: mod_base = OTHER; note = 2'-O-methylcytidine-3'-phosphate
  modified_base 8: mod_base = OTHER; note = 2'-fluorocytidine-3'-phosphate
  modified_base 9: mod_base = OTHER; note = 2'-fluoroadenosine-3'-phosphate
  modified_base 10: mod_base = OTHER; note = 2'-O-methyluridine-3'-phosphate
  modified_base 11: mod_base = OTHER; note = 2'-O-methylcytidine-3'-phosphate
  modified_base 12: mod_base = OTHER; note = 2'-O-methylcytidine-3'-phosphate
  modified_base 13: mod_base = OTHER; note = 2'-O-methyladenosine-3'-phosphate
  modified_base 14: mod_base = OTHER; note = 2'-fluoroguanosine-3'-phosphate
  modified_base 15: mod_base = OTHER; note = 2'-O-methylcytidine-3'-phosphate
  modified_base 16: mod_base = OTHER; note = 2'-fluoroadenosine-3'-phosphate
  modified_base 17: mod_base = OTHER; note = 2'-O-methyluridine-3'-phosphate
  modified_base 18: mod_base = OTHER; note = 2'-O-methylcytidine-3'-phosphate
  modified_base 19: mod_base = OTHER; note = 2'-O-methyladenosine-3'-phosphate
  modified_base 20: mod_base = OTHER; note = 2'-O-methylguanosine-3'-phosphate
  modified_base 21: mod_base = OTHER; note = 2'-O-methylguanosine-3'- phosphorothioate
  modified_base 22: mod_base = OTHER; note = 2'-O-methyladenosine-3'- phosphorothioate
  modified_base 23: mod_base = OTHER; note = 2'-O-methyluridine-3'-phosphate
ttaataccatccagcatcaggat

SEQ ID NO: 3855 - RNA, 23 nt, synthetic construct
  source 1..23: mol_type = other RNA
  modified_base 1: mod_base = OTHER; note = 2'-O-methyladenosine-3'- phosphorothioate
  modified_base 2: mod_base = OTHER; note = 2'-fluorocytidine-3'-phosphorothioate
  modified_base 3: mod_base = OTHER; note = 2'-O-methyluridine-3'-phosphate
  modified_base 4: mod_base = OTHER; note = 2'-O-methyluridine-3'-phosphate
  modified_base 5: mod_base = OTHER; note = 2'-O-methylguanosine-3'-phosphate
  modified_base 6: mod_base = OTHER; note = 2'-fluoroguanosine-3'-phosphate
  modified_base 7: mod_base = OTHER; note = 2'-O-methyladenosine-3'-phosphate
  modified_base 8: mod_base = OTHER; note = 2'-fluorouridine-3'-phosphate
  modified_base 9: mod_base = OTHER; note = 2'-fluoroadenosine-3'-phosphate
  modified_base 10: mod_base = OTHER; note = 2'-O-methylguanosine-3'-phosphate
  modified_base 11: mod_base = OTHER; note = 2'-O-methyluridine-3'-phosphate
  modified_base 12: mod_base = OTHER; note = 2'-O-methyluridine-3'-phosphate
  modified_base 13: mod_base = OTHER; note = 2'-O-methylguanosine-3'-phosphate
  modified_base 14: mod_base = OTHER; note = 2'-fluoroguanosine-3'-phosphate
  modified_base 15: mod_base = OTHER; note = 2'-O-methyluridine-3'-phosphate
  modified_base 16: mod_base = OTHER; note = 2'-fluorouridine-3'-phosphate
  modified_base 17: mod_base = OTHER; note = 2'-O-methylguanosine-3'-phosphate
  modified_base 18: mod_base = OTHER; note = 2'-O-methylcytidine-3'-phosphate
  modified_base 19: mod_base = OTHER; note = 2'-O-methyladenosine-3'-phosphate
  modified_base 20: mod_base = OTHER; note = 2'-O-methyluridine-3'-phosphate
  modified_base 21: mod_base = OTHER; note = 2'-O-methyluridine-3'-phosphorothioate
  modified_base 22: mod_base = OTHER; note = 2'-O-methylguanosine-3'- phosphorothioate
  modified_base 23: mod_base = OTHER; note = 2'-O-methyluridine-3'-phosphate
acttggatagttggttgcattgt

SEQ ID NO: 3856 - RNA, 23 nt, synthetic construct
  source 1..23: mol_type = other RNA
  modified_base 1: mod_base = OTHER; note = 2'-O-methyluridine-3'-phosphorothioate
  modified_base 2: mod_base = OTHER; note = 2'-fluoroadenosine-3'-phosphorothioate
  modified_base 3: mod_base = OTHER; note = 2'-O-methyluridine-3'-phosphate
  modified_base 4: mod_base = OTHER; note = 2'-O-methylcytidine-3'-phosphate
  modified_base 5: mod_base = OTHER; note = 2'-O-methyladenosine-3'-phosphate
  modified_base 6: mod_base = OTHER; note = 2'-fluorouridine-3'-phosphate
  modified_base 7: mod_base = OTHER; note = 2'-O-methylcytidine-3'-phosphate
  modified_base 8: mod_base = OTHER; note = 2'-fluorocytidine-3'-phosphate
  modified_base 9: mod_base = OTHER; note = 2'-fluorouridine-3'-phosphate
  modified_base 10: mod_base = OTHER; note = 2'-O-methyluridine-3'-phosphate
  modified_base 11: mod_base = OTHER; note = 2'-O-methyluridine-3'-phosphate
  modified_base 12: mod_base = OTHER; note = 2'-O-methyladenosine-3'-phosphate
  modified_base 13: mod_base = OTHER; note = 2'-O-methyluridine-3'-phosphate
  modified_base 14: mod_base = OTHER; note = 2'-fluorouridine-3'-phosphate
  modified_base 15: mod_base = OTHER; note = 2'-O-methylcytidine-3'-phosphate
  modified_base 16: mod_base = OTHER; note = 2'-fluorocytidine-3'-phosphate
  modified_base 17: mod_base = OTHER; note = 2'-O-methylguanosine-3'-phosphate
  modified_base 18: mod_base = OTHER; note = 2'-O-methyluridine-3'-phosphate
  modified_base 19: mod_base = OTHER; note = 2'-O-methyladenosine-3'-phosphate
  modified_base 20: mod_base = OTHER; note = 2'-O-methyladenosine-3'-phosphate
  modified_base 21: mod_base = OTHER; note = 2'-O-methyladenosine-3'- phosphorothioate
  modified_base 22: mod_base = OTHER; note = 2'-O-methylguanosine-3'- phosphorothioate
  modified_base 23: mod_base = OTHER; note = 2'-O-methyladenosine-3'-phosphate
tatcatcctttattccgtaaaga

SEQ ID NO: 3857 - RNA, 23 nt, synthetic construct
  source 1..23: mol_type = other RNA
  modified_base 1: mod_base = OTHER; note = 2'-O-methyladenosine-3'- phosphorothioate
  modified_base 2: mod_base = OTHER; note = 2'-fluoroadenosine-3'-phosphorothioate
  modified_base 3: mod_base = OTHER; note = 2'-O-methyluridine-3'-phosphate
  modified_base 4: mod_base = OTHER; note = 2'-O-methylguanosine-3'-phosphate
  modified_base 5: mod_base = OTHER; note = 2'-O-methylcytidine-3'-phosphate
  modified_base 6: mod_base = OTHER; note = 2'-fluoroadenosine-3'-phosphate
  modified_base 7: mod_base = OTHER; note = 2'-O-methyladenosine-3'-phosphate
  modified_base 8: mod_base = OTHER; note = 2'-fluoroguanosine-3'-phosphate
  modified_base 9: mod_base = OTHER; note = 2'-fluoroguanosine-3'-phosphate
  modified_base 10: mod_base = OTHER; note = 2'-O-methyladenosine-3'-phosphate
  modified_base 11: mod_base = OTHER; note = 2'-O-methyladenosine-3'-phosphate
  modified_base 12: mod_base = OTHER; note = 2'-O-methylcytidine-3'-phosphate
  modified_base 13: mod_base = OTHER; note = 2'-O-methyladenosine-3'-phosphate
  modified_base 14: mod_base = OTHER; note = 2'-fluorocytidine-3'-phosphate
  modified_base 15: mod_base = OTHER; note = 2'-O-methyluridine-3'-phosphate
  modified_base 16: mod_base = OTHER; note = 2'-fluoroadenosine-3'-phosphate
  modified_base 17: mod_base = OTHER; note = 2'-O-methyladenosine-3'-phosphate
  modified_base 18: mod_base = OTHER; note = 2'-O-methylguanosine-3'-phosphate
  modified_base 19: mod_base = OTHER; note = 2'-O-methylguanosine-3'-phosphate
  modified_base 20: mod_base = OTHER; note = 2'-O-methyladenosine-3'-phosphate
  modified_base 21: mod_base = OTHER; note = 2'-O-methyladenosine-3'- phosphorothioate
  modified_base 22: mod_base = OTHER; note = 2'-O-methylguanosine-3'- phosphorothioate
  modified_base 23: mod_base = OTHER; note = 2'-O-methyladenosine-3'-phosphate
aatgcaaggaacactaaggaaga

SEQ ID NO: 3858 - RNA, 23 nt, synthetic construct
  source 1..23: mol_type = other RNA
  modified_base 1: mod_base = OTHER; note = 2'-O-methyluridine-3'-phosphorothioate
  modified_base 2: mod_base = OTHER; note = 2'-fluorouridine -3'-phosphorothioate
  modified_base 3: mod_base = OTHER; note = 2'-O-methyluridine-3'-phosphate
  modified_base 4: mod_base = OTHER; note = 2'-O-methylguanosine-3'-phosphate
  modified_base 5: mod_base = OTHER; note = 2'-O-methylguanosine-3'-phosphate
  modified_base 6: mod_base = OTHER; note = 2'-fluoroadenosine-3'-phosphate
  modified_base 7: mod_base = OTHER; note = 2'-O-methyluridine-3'-phosphate
  modified_base 8: mod_base = OTHER; note = 2'-fluoroadenosine-3'-phosphate
  modified_base 9: mod_base = OTHER; note = 2'-fluoroguanosine-3'-phosphate
  modified_base 10: mod_base = OTHER; note = 2'-O-methyluridine-3'-phosphate
  modified_base 11: mod_base = OTHER; note = 2'-O-methyluridine-3'-phosphate
  modified_base 12: mod_base = OTHER; note = 2'-O-methylguanosine-3'-phosphate
  modified_base 13: mod_base = OTHER; note = 2'-O-methylguanosine-3'-phosphate
  modified_base 14: mod_base = OTHER; note = 2'-fluorouridine-3'-phosphate
  modified_base 15: mod_base = OTHER; note = 2'-O-methyluridine-3'-phosphate
  modified_base 16: mod_base = OTHER; note = 2'-fluoroguanosine-3'-phosphate
  modified_base 17: mod_base = OTHER; note = 2'-O-methylcytidine-3'-phosphate
  modified_base 18: mod_base = OTHER; note = 2'-O-methyladenosine-3'-phosphate
  modified_base 19: mod_base = OTHER; note = 2'-O-methyluridine-3'-phosphate
  modified_base 20: mod_base = OTHER; note = 2'-O-methyluridine-3'-phosphate
  modified_base 21: mod_base = OTHER; note = 2'-O-methylguanosine-3'- phosphorothioate
  modified_base 22: mod_base = OTHER; note = 2'-O-methyluridine-3'-phosphorothioate
  modified_base 23: mod_base = OTHER; note = 2'-O-methyluridine-3'-phosphate
tttggatagttggttgcattgtt

SEQ ID NO: 3859 - RNA, 23 nt, synthetic construct
  source 1..23: mol_type = other RNA
  modified_base 1: mod_base = OTHER; note = 2'-O-methyladenosine-3'- phosphorothioate
  modified_base 2: mod_base = OTHER; note = 2'-fluorouridine -3'-phosphorothioate
  modified_base 3: mod_base = OTHER; note = 2'-O-methyluridine-3'-phosphate
  modified_base 4: mod_base = OTHER; note = 2'-O-methyladenosine-3'-phosphate
  modified_base 5: mod_base = OTHER; note = 2'-O-methyluridine-3'-phosphate
  modified_base 6: mod_base = OTHER; note = 2'-fluoroadenosine-3'-phosphate
  modified_base 7: mod_base = OTHER; note = 2'-O-methylcytidine-3'-phosphate
  modified_base 8: mod_base = OTHER; note = 2'-fluorouridine-3'-phosphate
  modified_base 9: mod_base = OTHER; note = 2'-fluorocytidine-3'-phosphate
  modified_base 10: mod_base = OTHER; note = 2'-O-methyluridine-3'-phosphate
  modified_base 11: mod_base = OTHER; note = 2'-O-methylcytidine-3'-phosphate
  modified_base 12: mod_base = OTHER; note = 2'-O-methyluridine-3'-phosphate
  modified_base 13: mod_base = OTHER; note = 2'-O-methylguanosine-3'-phosphate
  modified_base 14: mod_base = OTHER; note = 2'-fluorocytidine-3'-phosphate
  modified_base 15: mod_base = OTHER; note = 2'-O-methylcytidine-3'-phosphate
  modified_base 16: mod_base = OTHER; note = 2'-fluoroadenosine-3'-phosphate
  modified_base 17: mod_base = OTHER; note = 2'-O-methyladenosine-3'-phosphate
  modified_base 18: mod_base = OTHER; note = 2'-O-methyladenosine-3'-phosphate
  modified_base 19: mod_base = OTHER; note = 2'-O-methyluridine-3'-phosphate
  modified_base 20: mod_base = OTHER; note = 2'-O-methylcytidine-3'-phosphate
  modified_base 21: mod_base = OTHER; note = 2'-O-methyluridine-3'-phosphorothioate
  modified_base 22: mod_base = OTHER; note = 2'-O-methylguanosine-3'- phosphorothioate
  modified_base 23: mod_base = OTHER; note = 2'-O-methylcytidine-3'-phosphate
attatactctctgccaaatctgc

SEQ ID NO: 3860 - RNA, 23 nt, synthetic construct
  source 1..23: mol_type = other RNA
  modified_base 1: mod_base = OTHER; note = 2'-O-methyluridine-3'-phosphorothioate
  modified_base 2: mod_base = OTHER; note = 2'-fluoroadenosine-3'-phosphorothioate
  modified_base 3: mod_base = OTHER; note = 2'-O-methylcytidine-3'-phosphate
  modified_base 4: mod_base = OTHER; note = 2'-O-methylcytidine-3'-phosphate
  modified_base 5: mod_base = OTHER; note = 2'-O-methylcytidine-3'-phosphate
  modified_base 6: mod_base = OTHER; note = 2'-fluorouridine-3'-phosphate
  modified_base 7: mod_base = OTHER; note = 2'-O-methyluridine-3'-phosphate
  modified_base 8: mod_base = OTHER; note = 2'-fluoroadenosine-3'-phosphate
  modified_base 9: mod_base = OTHER; note = 2'-fluoroadenosine-3'-phosphate
  modified_base 10: mod_base = OTHER; note = 2'-O-methyluridine-3'-phosphate
  modified_base 11: mod_base = OTHER; note = 2'-O-methylcytidine-3'-phosphate
  modified_base 12: mod_base = OTHER; note = 2'-O-methyladenosine-3'-phosphate
  modified_base 13: mod_base = OTHER; note = 2'-O-methyluridine-3'-phosphate
  modified_base 14: mod_base = OTHER; note = 2'-fluoroguanosine-3'-phosphate
  modified_base 15: mod_base = OTHER; note = 2'-O-methylguanosine-3'-phosphate
  modified_base 16: mod_base = OTHER; note = 2'-fluorouridine-3'-phosphate
  modified_base 17: mod_base = OTHER; note = 2'-O-methylguanosine-3'-phosphate
  modified_base 18: mod_base = OTHER; note = 2'-O-methylguanosine-3'-phosphate
  modified_base 19: mod_base = OTHER; note = 2'-O-methyladenosine-3'-phosphate
  modified_base 20: mod_base = OTHER; note = 2'-O-methyladenosine-3'-phosphate
  modified_base 21: mod_base = OTHER; note = 2'-O-methyladenosine-3'- phosphorothioate
  modified_base 22: mod_base = OTHER; note = 2'-O-methylcytidine-3'- phosphorothioate
  modified_base 23: mod_base = OTHER; note = 2'-O-methyluridine-3'-phosphate
tacccttaatcatggtggaaact

SEQ ID NO: 3861 - RNA, 23 nt, synthetic construct
  source 1..23: mol_type = other RNA
  modified_base 1: mod_base = OTHER; note = 2'-O-methyladenosine-3'- phosphorothioate
  modified_base 2: mod_base = OTHER; note = 2'-fluoroadenosine-3'-phosphorothioate
  modified_base 3: mod_base = OTHER; note = 2'-O-methylcytidine-3'-phosphate
  modified_base 4: mod_base = OTHER; note = 2'-O-methyluridine-3'-phosphate
  modified_base 5: mod_base = OTHER; note = 2'-O-methyladenosine-3'-phosphate
  modified_base 6: mod_base = OTHER; note = 2'-fluorouridine-3'-phosphate
  modified_base 7: mod_base = OTHER; note = 2'-O-methyluridine-3'-phosphate
  modified_base 8: mod_base = OTHER; note = 2'-fluorouridine-3'-phosphate
  modified_base 9: mod_base = OTHER; note = 2'-fluorocytidine-3'-phosphate
  modified_base 10: mod_base = OTHER; note = 2'-O-methyladenosine-3'-phosphate
  modified_base 11: mod_base = OTHER; note = 2'-O-methylcytidine-3'-phosphate
  modified_base 12: mod_base = OTHER; note = 2'-O-methyladenosine-3'-phosphate
  modified_base 13: mod_base = OTHER; note = 2'-O-methylcytidine-3'-phosphate
  modified_base 14: mod_base = OTHER; note = 2'-fluorouridine-3'-phosphate
  modified_base 15: mod_base = OTHER; note = 2'-O-methyladenosine-3'-phosphate
  modified_base 16: mod_base = OTHER; note = 2'-fluoroadenosine-3'-phosphate
  modified_base 17: mod_base = OTHER; note = 2'-O-methylcytidine-3'-phosphate
  modified_base 18: mod_base = OTHER; note = 2'-O-methylcytidine-3'-phosphate
  modified_base 19: mod_base = OTHER; note = 2'-O-methyladenosine-3'-phosphate
  modified_base 20: mod_base = OTHER; note = 2'-O-methylguanosine-3'-phosphate
  modified_base 21: mod_base = OTHER; note = 2'-O-methyluridine-3'-phosphorothioate
  modified_base 22: mod_base = OTHER; note = 2'-O-methyluridine-3'-phosphorothioate
  modified_base 23: mod_base = OTHER; note = 2'-O-methylguanosine-3'-phosphate
aactatttcacactaaccagttg

SEQ ID NO: 3862 - RNA, 23 nt, synthetic construct
  source 1..23: mol_type = other RNA
  modified_base 1: mod_base = OTHER; note = 2'-O-methyladenosine-3'- phosphorothioate
  modified_base 2: mod_base = OTHER; note = 2'-fluoroguanosine-3'-phosphorothioate
  modified_base 3: mod_base = OTHER; note = 2'-O-methyladenosine-3'-phosphate
  modified_base 4: mod_base = OTHER; note = 2'-O-methylguanosine-3'-phosphate
  modified_base 5: mod_base = OTHER; note = 2'-O-methyluridine-3'-phosphate
  modified_base 6: mod_base = OTHER; note = 2'-fluorouridine-3'-phosphate
  modified_base 7: mod_base = OTHER; note = 2'-O-methylguanosine-3'-phosphate
  modified_base 8: mod_base = OTHER; note = 2'-fluorocytidine-3'-phosphate
  modified_base 9: mod_base = OTHER; note = 2'-fluorocytidine-3'-phosphate
  modified_base 10: mod_base = OTHER; note = 2'-O-methyladenosine-3'-phosphate
  modified_base 11: mod_base = OTHER; note = 2'-O-methyluridine-3'-phosphate
  modified_base 12: mod_base = OTHER; note = 2'-O-methyladenosine-3'-phosphate
  modified_base 13: mod_base = OTHER; note = 2'-O-methyluridine-3'-phosphate
  modified_base 14: mod_base = OTHER; note = 2'-fluorouridine-3'-phosphate
  modified_base 15: mod_base = OTHER; note = 2'-O-methylguanosine-3'-phosphate
  modified_base 16: mod_base = OTHER; note = 2'-fluoroguanosine-3'-phosphate
  modified_base 17: mod_base = OTHER; note = 2'-O-methyladenosine-3'-phosphate
  modified_base 18: mod_base = OTHER; note = 2'-O-methylcytidine-3'-phosphate
  modified_base 19: mod_base = OTHER; note = 2'-O-methyluridine-3'-phosphate
  modified_base 20: mod_base = OTHER; note = 2'-O-methyluridine-3'-phosphate
  modified_base 21: mod_base = OTHER; note = 2'-O-methylguanosine-3'- phosphorothioate
  modified_base 22: mod_base = OTHER; note = 2'-O-methylguanosine-3'- phosphorothioate
  modified_base 23: mod_base = OTHER; note = 2'-O-methyladenosine-3'-phosphate
agagttgccatattggacttgga

SEQ ID NO: 3863 - RNA, 23 nt, synthetic construct
  source 1..23: mol_type = other RNA
  modified_base 1: mod_base = OTHER; note = 2'-O-methyladenosine-3'- phosphorothioate
  modified_base 2: mod_base = OTHER; note = 2'-fluoroadenosine-3'-phosphorothioate
  modified_base 3: mod_base = OTHER; note = 2'-O-methylguanosine-3'-phosphate
  modified_base 4: mod_base = OTHER; note = 2'-O-methyladenosine-3'-phosphate
  modified_base 5: mod_base = OTHER; note = 2'-O-methylcytidine-3'-phosphate
  modified_base 6: mod_base = OTHER; note = 2'-fluorocytidine-3'-phosphate
  modified_base 7: mod_base = OTHER; note = 2'-O-methylcytidine-3'-phosphate
  modified_base 8: mod_base = OTHER; note = 2'-fluorouridine-3'-phosphate
  modified_base 9: mod_base = OTHER; note = 2'-fluorouridine-3'-phosphate
  modified_base 10: mod_base = OTHER; note = 2'-O-methyladenosine-3'-phosphate
  modified_base 11: mod_base = OTHER; note = 2'-O-methyladenosine-3'-phosphate
  modified_base 12: mod_base = OTHER; note = 2'-O-methyluridine-3'-phosphate
  modified_base 13: mod_base = OTHER; note = 2'-O-methylcytidine-3'-phosphate
  modified_base 14: mod_base = OTHER; note = 2'-fluoroadenosine-3'-phosphate
  modified_base 15: mod_base = OTHER; note = 2'-O-methyluridine-3'-phosphate
  modified_base 16: mod_base = OTHER; note = 2'-fluoroguanosine-3'-phosphate
  modified_base 17: mod_base = OTHER; note = 2'-O-methylguanosine-3'-phosphate
  modified_base 18: mod_base = OTHER; note = 2'-O-methyluridine-3'-phosphate
  modified_base 19: mod_base = OTHER; note = 2'-O-methylguanosine-3'-phosphate
  modified_base 20: mod_base = OTHER; note = 2'-O-methylguanosine-3'-phosphate
  modified_base 21: mod_base = OTHER; note = 2'-O-methyladenosine-3'- phosphorothioate
  modified_base 22: mod_base = OTHER; note = 2'-O-methyladenosine-3'- phosphorothioate
  modified_base 23: mod_base = OTHER; note = 2'-O-methyladenosine-3'-phosphate
aagacccttaatcatggtggaaa

SEQ ID NO: 3864 - RNA, 23 nt, synthetic construct
  source 1..23: mol_type = other RNA
  modified_base 1: mod_base = OTHER; note = 2'-O-methyluridine-3'-phosphorothioate
  modified_base 2: mod_base = OTHER; note = 2'-fluorouridine -3'-phosphorothioate
  modified_base 3: mod_base = OTHER; note = 2'-O-methyladenosine-3'-phosphate
  modified_base 4: mod_base = OTHER; note = 2'-O-methylguanosine-3'-phosphate
  modified_base 5: mod_base = OTHER; note = 2'-O-methylcytidine-3'-phosphate
  modified_base 6: mod_base = OTHER; note = 2'-fluorocytidine-3'-phosphate
  modified_base 7: mod_base = OTHER; note = 2'-O-methyluridine-3'-phosphate
  modified_base 8: mod_base = OTHER; note = 2'-fluoroadenosine-3'-phosphate
  modified_base 9: mod_base = OTHER; note = 2'-fluoroguanosine-3'-phosphate
  modified_base 10: mod_base = OTHER; note = 2'-O-methyladenosine-3'-phosphate
  modified_base 11: mod_base = OTHER; note = 2'-O-methylcytidine-3'-phosphate
  modified_base 12: mod_base = OTHER; note = 2'-O-methyladenosine-3'-phosphate
  modified_base 13: mod_base = OTHER; note = 2'-O-methylguanosine-3'-phosphate
  modified_base 14: mod_base = OTHER; note = 2'-fluorouridine-3'-phosphate
  modified_base 15: mod_base = OTHER; note = 2'-O-methylguanosine-3'-phosphate
  modified_base 16: mod_base = OTHER; note = 2'-fluoroadenosine-3'-phosphate
  modified_base 17: mod_base = OTHER; note = 2'-O-methyladenosine-3'-phosphate
  modified_base 18: mod_base = OTHER; note = 2'-O-methyladenosine-3'-phosphate
  modified_base 19: mod_base = OTHER; note = 2'-O-methyluridine-3'-phosphate
  modified_base 20: mod_base = OTHER; note = 2'-O-methylguanosine-3'-phosphate
  modified_base 21: mod_base = OTHER; note = 2'-O-methyladenosine-3'- phosphorothioate
  modified_base 22: mod_base = OTHER; note = 2'-O-methyluridine-3'-phosphorothioate
  modified_base 23: mod_base = OTHER; note = 2'-O-methyladenosine-3'-phosphate
ttagcctagacagtgaaatgata

SEQ ID NO: 3865 - RNA, 23 nt, synthetic construct
  source 1..23: mol_type = other RNA
  modified_base 1: mod_base = OTHER; note = 2'-O-methyladenosine-3'- phosphorothioate
  modified_base 2: mod_base = OTHER; note = 2'-fluorocytidine-3'-phosphorothioate
  modified_base 3: mod_base = OTHER; note = 2'-O-methyladenosine-3'-phosphate
  modified_base 4: mod_base = OTHER; note = 2'-O-methylguanosine-3'-phosphate
  modified_base 5: mod_base = OTHER; note = 2'-O-methyladenosine-3'-phosphate
  modified_base 6: mod_base = OTHER; note = 2'-fluorouridine-3'-phosphate
  modified_base 7: mod_base = OTHER; note = 2'-O-methylcytidine-3'-phosphate
  modified_base 8: mod_base = OTHER; note = 2'-fluoroadenosine-3'-phosphate
  modified_base 9: mod_base = OTHER; note = 2'-fluoroguanosine-3'-phosphate
  modified_base 10: mod_base = OTHER; note = 2'-O-methyladenosine-3'-phosphate
  modified_base 11: mod_base = OTHER; note = 2'-O-methyluridine-3'-phosphate
  modified_base 12: mod_base = OTHER; note = 2'-O-methyladenosine-3'-phosphate
  modified_base 13: mod_base = OTHER; note = 2'-O-methyladenosine-3'-phosphate
  modified_base 14: mod_base = OTHER; note = 2'-fluoroadenosine-3'-phosphate
  modified_base 15: mod_base = OTHER; note = 2'-O-methyladenosine-3'-phosphate
  modified_base 16: mod_base = OTHER; note = 2'-fluoroadenosine-3'-phosphate
  modified_base 17: mod_base = OTHER; note = 2'-O-methylguanosine-3'-phosphate
  modified_base 18: mod_base = OTHER; note = 2'-O-methylguanosine-3'-phosphate
  modified_base 19: mod_base = OTHER; note = 2'-O-methyladenosine-3'-phosphate
  modified_base 20: mod_base = OTHER; note = 2'-O-methylcytidine-3'-phosphate
  modified_base 21: mod_base = OTHER; note = 2'-O-methyladenosine-3'- phosphorothioate
  modified_base 22: mod_base = OTHER; note = 2'-O-methyladenosine-3'- phosphorothioate
  modified_base 23: mod_base = OTHER; note = 2'-O-methylcytidine-3'-phosphate
acagatcagataaaaaggacaac

SEQ ID NO: 3866 - RNA, 23 nt, synthetic construct
  source 1..23: mol_type = other RNA
  modified_base 1: mod_base = OTHER; note = 2'-O-methyluridine-3'-phosphorothioate
  modified_base 2: mod_base = OTHER; note = 2'-fluoroadenosine-3'-phosphorothioate
  modified_base 3: mod_base = OTHER; note = 2'-O-methyluridine-3'-phosphate
  modified_base 4: mod_base = OTHER; note = 2'-O-methyladenosine-3'-phosphate
  modified_base 5: mod_base = OTHER; note = 2'-O-methyluridine-3'-phosphate
  modified_base 6: mod_base = OTHER; note = 2'-fluorouridine-3'-phosphate
  modified_base 7: mod_base = OTHER; note = 2'-O-methylguanosine-3'-phosphate
  modified_base 8: mod_base = OTHER; note = 2'-fluoroguanosine-3'-phosphate
  modified_base 9: mod_base = OTHER; note = 2'-fluoroadenosine-3'-phosphate
  modified_base 10: mod_base = OTHER; note = 2'-O-methyluridine-3'-phosphate
  modified_base 11: mod_base = OTHER; note = 2'-O-methyluridine-3'-phosphate
  modified_base 12: mod_base = OTHER; note = 2'-O-methyluridine-3'-phosphate
  modified_base 13: mod_base = OTHER; note = 2'-O-methyladenosine-3'-phosphate
  modified_base 14: mod_base = OTHER; note = 2'-fluorouridine-3'-phosphate
  modified_base 15: mod_base = OTHER; note = 2'-O-methyladenosine-3'-phosphate
  modified_base 16: mod_base = OTHER; note = 2'-fluorocytidine-3'-phosphate
  modified_base 17: mod_base = OTHER; note = 2'-O-methyladenosine-3'-phosphate
  modified_base 18: mod_base = OTHER; note = 2'-O-methylcytidine-3'-phosphate
  modified_base 19: mod_base = OTHER; note = 2'-O-methyluridine-3'-phosphate
  modified_base 20: mod_base = OTHER; note = 2'-O-methylguanosine-3'-phosphate
  modified_base 21: mod_base = OTHER; note = 2'-O-methylguanosine-3'- phosphorothioate
  modified_base 22: mod_base = OTHER; note = 2'-O-methyladenosine-3'- phosphorothioate
  modified_base 23: mod_base = OTHER; note = 2'-O-methyluridine-3'-phosphate
tatattggatttatacactggat

SEQ ID NO: 3867 - RNA, 23 nt, synthetic construct
  source 1..23: mol_type = other RNA
  modified_base 1: mod_base = OTHER; note = 2'-O-methyluridine-3'-phosphorothioate
  modified_base 2: mod_base = OTHER; note = 2'-fluorouridine -3'-phosphorothioate
  modified_base 3: mod_base = OTHER; note = 2'-O-methyladenosine-3'-phosphate
  modified_base 4: mod_base = OTHER; note = 2'-O-methylguanosine-3'-phosphate
  modified_base 5: mod_base = OTHER; note = 2'-O-methyluridine-3'-phosphate
  modified_base 6: mod_base = OTHER; note = 2'-fluorouridine-3'-phosphate
  modified_base 7: mod_base = OTHER; note = 2'-O-methylguanosine-3'-phosphate
  modified_base 8: mod_base = OTHER; note = 2'-fluoroguanosine-3'-phosphate
  modified_base 9: mod_base = OTHER; note = 2'-fluorouridine-3'-phosphate
  modified_base 10: mod_base = OTHER; note = 2'-O-methyladenosine-3'-phosphate
  modified_base 11: mod_base = OTHER; note = 2'-O-methyluridine-3'-phosphate
  modified_base 12: mod_base = OTHER; note = 2'-O-methyladenosine-3'-phosphate
  modified_base 13: mod_base = OTHER; note = 2'-O-methyladenosine-3'-phosphate
  modified_base 14: mod_base = OTHER; note = 2'-fluorocytidine-3'-phosphate
  modified_base 15: mod_base = OTHER; note = 2'-O-methyladenosine-3'-phosphate
  modified_base 16: mod_base = OTHER; note = 2'-fluorocytidine-3'-phosphate
  modified_base 17: mod_base = OTHER; note = 2'-O-methyluridine-3'-phosphate
  modified_base 18: mod_base = OTHER; note = 2'-O-methyluridine-3'-phosphate
  modified_base 19: mod_base = OTHER; note = 2'-O-methylguanosine-3'-phosphate
  modified_base 20: mod_base = OTHER; note = 2'-O-methylguanosine-3'-phosphate
  modified_base 21: mod_base = OTHER; note = 2'-O-methyladenosine-3'- phosphorothioate
  modified_base 22: mod_base = OTHER; note = 2'-O-methyluridine-3'-phosphorothioate
  modified_base 23: mod_base = OTHER; note = 2'-O-methyladenosine-3'-phosphate
ttagttggtataacacttggata

SEQ ID NO: 3868 - RNA, 23 nt, synthetic construct
  source 1..23: mol_type = other RNA
  modified_base 1: mod_base = OTHER; note = 2'-O-methyluridine-3'-phosphorothioate
  modified_base 2: mod_base = OTHER; note = 2'-fluoroadenosine-3'-phosphorothioate
  modified_base 3: mod_base = OTHER; note = 2'-O-methylguanosine-3'-phosphate
  modified_base 4: mod_base = OTHER; note = 2'-O-methyladenosine-3'-phosphate
  modified_base 5: mod_base = OTHER; note = 2'-O-methylguanosine-3'-phosphate
  modified_base 6: mod_base = OTHER; note = 2'-fluoroadenosine-3'-phosphate
  modified_base 7: mod_base = OTHER; note = 2'-O-methylcytidine-3'-phosphate
  modified_base 8: mod_base = OTHER; note = 2'-fluoroadenosine-3'-phosphate
  modified_base 9: mod_base = OTHER; note = 2'-fluoroadenosine-3'-phosphate
  modified_base 10: mod_base = OTHER; note = 2'-O-methyluridine-3'-phosphate
  modified_base 11: mod_base = OTHER; note = 2'-O-methylcytidine-3'-phosphate
  modified_base 12: mod_base = OTHER; note = 2'-O-methyluridine-3'-phosphate
  modified_base 13: mod_base = OTHER; note = 2'-O-methyluridine-3'-phosphate
  modified_base 14: mod_base = OTHER; note = 2'-fluorouridine-3'-phosphate
  modified_base 15: mod_base = OTHER; note = 2'-O-methylguanosine-3'-phosphate
  modified_base 16: mod_base = OTHER; note = 2'-fluoroguanosine-3'-phosphate
  modified_base 17: mod_base = OTHER; note = 2'-O-methyluridine-3'-phosphate
  modified_base 18: mod_base = OTHER; note = 2'-O-methylguanosine-3'-phosphate
  modified_base 19: mod_base = OTHER; note = 2'-O-methyluridine-3'-phosphate
  modified_base 20: mod_base = OTHER; note = 2'-O-methyluridine-3'-phosphate
  modified_base 21: mod_base = OTHER; note = 2'-O-methylcytidine-3'- phosphorothioate
  modified_base 22: mod_base = OTHER; note = 2'-O-methyluridine-3'-phosphorothioate
  modified_base 23: mod_base = OTHER; note = 2'-O-methyladenosine-3'-phosphate
tagagacaatctttggtgttcta

SEQ ID NO: 3869 - RNA, 23 nt, synthetic construct
  source 1..23: mol_type = other RNA
  modified_base 1: mod_base = OTHER; note = 2'-O-methyluridine-3'-phosphorothioate
  modified_base 2: mod_base = OTHER; note = 2'-fluorocytidine-3'-phosphorothioate
  modified_base 3: mod_base = OTHER; note = 2'-O-methyladenosine-3'-phosphate
  modified_base 4: mod_base = OTHER; note = 2'-O-methylguanosine-3'-phosphate
  modified_base 5: mod_base = OTHER; note = 2'-O-methyladenosine-3'-phosphate
  modified_base 6: mod_base = OTHER; note = 2'-fluoroguanosine-3'-phosphate
  modified_base 7: mod_base = OTHER; note = 2'-O-methyladenosine-3'-phosphate
  modified_base 8: mod_base = OTHER; note = 2'-fluorocytidine-3'-phosphate
  modified_base 9: mod_base = OTHER; note = 2'-fluoroadenosine-3'-phosphate
  modified_base 10: mod_base = OTHER; note = 2'-O-methyladenosine-3'-phosphate
  modified_base 11: mod_base = OTHER; note = 2'-O-methyluridine-3'-phosphate
  modified_base 12: mod_base = OTHER; note = 2'-O-methylcytidine-3'-phosphate
  modified_base 13: mod_base = OTHER; note = 2'-O-methyluridine-3'-phosphate
  modified_base 14: mod_base = OTHER; note = 2'-fluorouridine-3'-phosphate
  modified_base 15: mod_base = OTHER; note = 2'-O-methyluridine-3'-phosphate
  modified_base 16: mod_base = OTHER; note = 2'-fluoroguanosine-3'-phosphate
  modified_base 17: mod_base = OTHER; note = 2'-O-methylguanosine-3'-phosphate
  modified_base 18: mod_base = OTHER; note = 2'-O-methyluridine-3'-phosphate
  modified_base 19: mod_base = OTHER; note = 2'-O-methylguanosine-3'-phosphate
  modified_base 20: mod_base = OTHER; note = 2'-O-methyluridine-3'-phosphate
  modified_base 21: mod_base = OTHER; note = 2'-O-methyluridine-3'-phosphorothioate
  modified_base 22: mod_base = OTHER; note = 2'-O-methylcytidine-3'- phosphorothioate
  modified_base 23: mod_base = OTHER; note = 2'-O-methyluridine-3'-phosphate
tcagagacaatctttggtgttct

SEQ ID NO: 3870 - RNA, 23 nt, synthetic construct
  source 1..23: mol_type = other RNA
  modified_base 1: mod_base = OTHER; note = 2'-O-methyladenosine-3'- phosphorothioate
  modified_base 2: mod_base = OTHER; note = 2'-fluorouridine -3'-phosphorothioate
  modified_base 3: mod_base = OTHER; note = 2'-O-methylcytidine-3'-phosphate
  modified_base 4: mod_base = OTHER; note = 2'-O-methyladenosine-3'-phosphate
  modified_base 5: mod_base = OTHER; note = 2'-O-methylguanosine-3'-phosphate
  modified_base 6: mod_base = OTHER; note = 2'-fluoroadenosine-3'-phosphate
  modified_base 7: mod_base = OTHER; note = 2'-O-methyluridine-3'-phosphate
  modified_base 8: mod_base = OTHER; note = 2'-fluoroadenosine-3'-phosphate
  modified_base 9: mod_base = OTHER; note = 2'-fluoroadenosine-3'-phosphate
  modified_base 10: mod_base = OTHER; note = 2'-O-methyladenosine-3'-phosphate
  modified_base 11: mod_base = OTHER; note = 2'-O-methyladenosine-3'-phosphate
  modified_base 12: mod_base = OTHER; note = 2'-O-methyladenosine-3'-phosphate
  modified_base 13: mod_base = OTHER; note = 2'-O-methylguanosine-3'-phosphate
  modified_base 14: mod_base = OTHER; note = 2'-fluoroguanosine-3'-phosphate
  modified_base 15: mod_base = OTHER; note = 2'-O-methyladenosine-3'-phosphate
  modified_base 16: mod_base = OTHER; note = 2'-fluorocytidine-3'-phosphate
  modified_base 17: mod_base = OTHER; note = 2'-O-methyladenosine-3'-phosphate
  modified_base 18: mod_base = OTHER; note = 2'-O-methyladenosine-3'-phosphate
  modified_base 19: mod_base = OTHER; note = 2'-O-methylcytidine-3'-phosphate
  modified_base 20: mod_base = OTHER; note = 2'-O-methyladenosine-3'-phosphate
  modified_base 21: mod_base = OTHER; note = 2'-O-methyluridine-3'-phosphorothioate
  modified_base 22: mod_base = OTHER; note = 2'-O-methylguanosine-3'- phosphorothioate
  modified_base 23: mod_base = OTHER; note = 2'-O-methylcytidine-3'-phosphate
atcagataaaaaggacaacatgc

SEQ ID NO: 3871 - RNA, 23 nt, synthetic construct
  source 1..23: mol_type = other RNA
  modified_base 1: mod_base = OTHER; note = 2'-O-methyladenosine-3'- phosphorothioate
  modified_base 2: mod_base = OTHER; note = 2'-fluorouridine -3'-phosphorothioate
  modified_base 3: mod_base = OTHER; note = 2'-O-methyluridine-3'-phosphate
  modified_base 4: mod_base = OTHER; note = 2'-O-methyluridine-3'-phosphate
  modified_base 5: mod_base = OTHER; note = 2'-O-methylcytidine-3'-phosphate
  modified_base 6: mod_base = OTHER; note = 2'-fluorouridine-3'-phosphate
  modified_base 7: mod_base = OTHER; note = 2'-O-methyladenosine-3'-phosphate
  modified_base 8: mod_base = OTHER; note = 2'-fluoroadenosine-3'-phosphate
  modified_base 9: mod_base = OTHER; note = 2'-fluorocytidine-3'-phosphate
  modified_base 10: mod_base = OTHER; note = 2'-O-methyluridine-3'-phosphate
  modified_base 11: mod_base = OTHER; note = 2'-O-methyluridine-3'-phosphate
  modified_base 12: mod_base = OTHER; note = 2'-O-methylcytidine-3'-phosphate
  modified_base 13: mod_base = OTHER; note = 2'-O-methyladenosine-3'-phosphate
  modified_base 14: mod_base = OTHER; note = 2'-fluoroguanosine-3'-phosphate
  modified_base 15: mod_base = OTHER; note = 2'-O-methylguanosine-3'-phosphate
  modified_base 16: mod_base = OTHER; note = 2'-fluoroadenosine-3'-phosphate
  modified_base 17: mod_base = OTHER; note = 2'-O-methylguanosine-3'-phosphate
  modified_base 18: mod_base = OTHER; note = 2'-O-methyluridine-3'-phosphate
  modified_base 19: mod_base = OTHER; note = 2'-O-methyluridine-3'-phosphate
  modified_base 20: mod_base = OTHER; note = 2'-O-methylguanosine-3'-phosphate
  modified_base 21: mod_base = OTHER; note = 2'-O-methyladenosine-3'- phosphorothioate
  modified_base 22: mod_base = OTHER; note = 2'-O-methyluridine-3'-phosphorothioate
  modified_base 23: mod_base = OTHER; note = 2'-O-methylguanosine-3'-phosphate
atttctaacttcaggagttgatg

SEQ ID NO: 3872 - RNA, 23 nt, synthetic construct
  source 1..23: mol_type = other RNA
  modified_base 1: mod_base = OTHER; note = 2'-O-methyluridine-3'-phosphorothioate
  modified_base 2: mod_base = OTHER; note = 2'-fluoroguanosine-3'-phosphorothioate
  modified_base 3: mod_base = OTHER; note = 2'-O-methylguanosine-3'-phosphate
  modified_base 4: mod_base = OTHER; note = 2'-O-methyluridine-3'-phosphate
  modified_base 5: mod_base = OTHER; note = 2'-O-methyladenosine-3'-phosphate
  modified_base 6: mod_base = OTHER; note = 2'-fluorouridine-3'-phosphate
  modified_base 7: mod_base = OTHER; note = 2'-O-methyladenosine-3'-phosphate
  modified_base 8: mod_base = OTHER; note = 2'-fluoroadenosine-3'-phosphate
  modified_base 9: mod_base = OTHER; note = 2'-fluorocytidine-3'-phosphate
  modified_base 10: mod_base = OTHER; note = 2'-O-methyladenosine-3'-phosphate
  modified_base 11: mod_base = OTHER; note = 2'-O-methylcytidine-3'-phosphate
  modified_base 12: mod_base = OTHER; note = 2'-O-methyluridine-3'-phosphate
  modified_base 13: mod_base = OTHER; note = 2'-O-methyluridine-3'-phosphate
  modified_base 14: mod_base = OTHER; note = 2'-fluoroguanosine-3'-phosphate
  modified_base 15: mod_base = OTHER; note = 2'-O-methylguanosine-3'-phosphate
  modified_base 16: mod_base = OTHER; note = 2'-fluoroadenosine-3'-phosphate
  modified_base 17: mod_base = OTHER; note = 2'-O-methyluridine-3'-phosphate
  modified_base 18: mod_base = OTHER; note = 2'-O-methyladenosine-3'-phosphate
  modified_base 19: mod_base = OTHER; note = 2'-O-methylguanosine-3'-phosphate
  modified_base 20: mod_base = OTHER; note = 2'-O-methyluridine-3'-phosphate
  modified_base 21: mod_base = OTHER; note = 2'-O-methyluridine-3'-phosphorothioate
  modified_base 22: mod_base = OTHER; note = 2'-O-methylguanosine-3'- phosphorothioate
  modified_base 23: mod_base = OTHER; note = 2'-O-methylguanosine-3'-phosphate
tggtataacacttggatagttgg

SEQ ID NO: 3873 - RNA, 23 nt, synthetic construct
  source 1..23: mol_type = other RNA
  modified_base 1: mod_base = OTHER; note = 2'-O-methyladenosine-3'- phosphorothioate
  modified_base 2: mod_base = OTHER; note = 2'-fluoroguanosine-3'-phosphorothioate
  modified_base 3: mod_base = OTHER; note = 2'-O-methyladenosine-3'-phosphate
  modified_base 4: mod_base = OTHER; note = 2'-O-methylcytidine-3'-phosphate
  modified_base 5: mod_base = OTHER; note = 2'-O-methyluridine-3'-phosphate
  modified_base 6: mod_base = OTHER; note = 2'-fluoroadenosine-3'-phosphate
  modified_base 7: mod_base = OTHER; note = 2'-O-methylcytidine-3'-phosphate
  modified_base 8: mod_base = OTHER; note = 2'-fluoroadenosine-3'-phosphate
  modified_base 9: mod_base = OTHER; note = 2'-fluorocytidine-3'-phosphate
  modified_base 10: mod_base = OTHER; note = 2'-O-methyladenosine-3'-phosphate
  modified_base 11: mod_base = OTHER; note = 2'-O-methyladenosine-3'-phosphate
  modified_base 12: mod_base = OTHER; note = 2'-O-methylguanosine-3'-phosphate
  modified_base 13: mod_base = OTHER; note = 2'-O-methyladenosine-3'-phosphate
  modified_base 14: mod_base = OTHER; note = 2'-fluorouridine-3'-phosphate
  modified_base 15: mod_base = OTHER; note = 2'-O-methyluridine-3'-phosphate
  modified_base 16: mod_base = OTHER; note = 2'-fluoroadenosine-3'-phosphate
  modified_base 17: mod_base = OTHER; note = 2'-O-methyladenosine-3'-phosphate
  modified_base 18: mod_base = OTHER; note = 2'-O-methyluridine-3'-phosphate
  modified_base 19: mod_base = OTHER; note = 2'-O-methyladenosine-3'-phosphate
  modified_base 20: mod_base = OTHER; note = 2'-O-methylcytidine-3'-phosphate
  modified_base 21: mod_base = OTHER; note = 2'-O-methylcytidine-3'- phosphorothioate
  modified_base 22: mod_base = OTHER; note = 2'-O-methyladenosine-3'- phosphorothioate
  modified_base 23: mod_base = OTHER; note = 2'-O-methyluridine-3'-phosphate
agactacacaagattaataccat

SEQ ID NO: 3874 - RNA, 23 nt, synthetic construct
  source 1..23: mol_type = other RNA
  modified_base 1: mod_base = OTHER; note = 2'-O-methyluridine-3'-phosphorothioate
  modified_base 2: mod_base = OTHER; note = 2'-fluoroguanosine-3'-phosphorothioate
  modified_base 3: mod_base = OTHER; note = 2'-O-methylcytidine-3'-phosphate
  modified_base 4: mod_base = OTHER; note = 2'-O-methyladenosine-3'-phosphate
  modified_base 5: mod_base = OTHER; note = 2'-O-methyluridine-3'-phosphate
  modified_base 6: mod_base = OTHER; note = 2'-fluoroguanosine-3'-phosphate
  modified_base 7: mod_base = OTHER; note = 2'-O-methyluridine-3'-phosphate
  modified_base 8: mod_base = OTHER; note = 2'-fluorouridine-3'-phosphate
  modified_base 9: mod_base = OTHER; note = 2'-fluorocytidine-3'-phosphate
  modified_base 10: mod_base = OTHER; note = 2'-O-methyladenosine-3'-phosphate
  modified_base 11: mod_base = OTHER; note = 2'-O-methylguanosine-3'-phosphate
  modified_base 12: mod_base = OTHER; note = 2'-O-methyluridine-3'-phosphate
  modified_base 13: mod_base = OTHER; note = 2'-O-methylguanosine-3'-phosphate
  modified_base 14: mod_base = OTHER; note = 2'-fluoroadenosine-3'-phosphate
  modified_base 15: mod_base = OTHER; note = 2'-O-methyladenosine-3'-phosphate
  modified_base 16: mod_base = OTHER; note = 2'-fluoroguanosine-3'-phosphate
  modified_base 17: mod_base = OTHER; note = 2'-O-methylguanosine-3'-phosphate
  modified_base 18: mod_base = OTHER; note = 2'-O-methyladenosine-3'-phosphate
  modified_base 19: mod_base = OTHER; note = 2'-O-methylguanosine-3'-phosphate
  modified_base 20: mod_base = OTHER; note = 2'-O-methylcytidine-3'-phosphate
  modified_base 21: mod_base = OTHER; note = 2'-O-methylcytidine-3'- phosphorothioate
  modified_base 22: mod_base = OTHER; note = 2'-O-methyladenosine-3'- phosphorothioate
  modified_base 23: mod_base = OTHER; note = 2'-O-methylguanosine-3'-phosphate
tgcatgttcagtgaaggagccag

SEQ ID NO: 3875 - RNA, 23 nt, synthetic construct
  source 1..23: mol_type = other RNA
  modified_base 1: mod_base = OTHER; note = 2'-O-methyluridine-3'-phosphorothioate
  modified_base 2: mod_base = OTHER; note = 2'-fluoroguanosine-3'-phosphorothioate
  modified_base 3: mod_base = OTHER; note = 2'-O-methylguanosine-3'-phosphate
  modified_base 4: mod_base = OTHER; note = 2'-O-methyluridine-3'-phosphate
  modified_base 5: mod_base = OTHER; note = 2'-O-methyladenosine-3'-phosphate
  modified_base 6: mod_base = OTHER; note = 2'-fluoroadenosine-3'-phosphate
  modified_base 7: mod_base = OTHER; note = 2'-O-methyluridine-3'-phosphate
  modified_base 8: mod_base = OTHER; note = 2'-fluoroguanosine-3'-phosphate
  modified_base 9: mod_base = OTHER; note = 2'-fluorouridine-3'-phosphate
  modified_base 10: mod_base = OTHER; note = 2'-O-methyladenosine-3'-phosphate
  modified_base 11: mod_base = OTHER; note = 2'-O-methylcytidine-3'-phosphate
  modified_base 12: mod_base = OTHER; note = 2'-O-methyladenosine-3'-phosphate
  modified_base 13: mod_base = OTHER; note = 2'-O-methylcytidine-3'-phosphate
  modified_base 14: mod_base = OTHER; note = 2'-fluorouridine-3'-phosphate
  modified_base 15: mod_base = OTHER; note = 2'-O-methyladenosine-3'-phosphate
  modified_base 16: mod_base = OTHER; note = 2'-fluorocytidine-3'-phosphate
  modified_base 17: mod_base = OTHER; note = 2'-O-methyluridine-3'-phosphate
  modified_base 18: mod_base = OTHER; note = 2'-O-methylguanosine-3'-phosphate
  modified_base 19: mod_base = OTHER; note = 2'-O-methyladenosine-3'-phosphate
  modified_base 20: mod_base = OTHER; note = 2'-O-methyluridine-3'-phosphate
  modified_base 21: mod_base = OTHER; note = 2'-O-methyladenosine-3'- phosphorothioate
  modified_base 22: mod_base = OTHER; note = 2'-O-methyluridine-3'-phosphorothioate
  modified_base 23: mod_base = OTHER; note = 2'-O-methyladenosine-3'-phosphate
tggtaatgtacactactgatata

SEQ ID NO: 3876 - RNA, 23 nt, synthetic construct
  source 1..23: mol_type = other RNA
  modified_base 1: mod_base = OTHER; note = 2'-O-methyluridine-3'-phosphorothioate
  modified_base 2: mod_base = OTHER; note = 2'-fluoroguanosine-3'-phosphorothioate
  modified_base 3: mod_base = OTHER; note = 2'-O-methyluridine-3'-phosphate
  modified_base 4: mod_base = OTHER; note = 2'-O-methylguanosine-3'-phosphate
  modified_base 5: mod_base = OTHER; note = 2'-O-methyluridine-3'-phosphate
  modified_base 6: mod_base = OTHER; note = 2'-fluorouridine-3'-phosphate
  modified_base 7: mod_base = OTHER; note = 2'-O-methylcytidine-3'-phosphate
  modified_base 8: mod_base = OTHER; note = 2'-fluorouridine-3'-phosphate
  modified_base 9: mod_base = OTHER; note = 2'-fluoroadenosine-3'-phosphate
  modified_base 10: mod_base = OTHER; note = 2'-O-methyladenosine-3'-phosphate
  modified_base 11: mod_base = OTHER; note = 2'-O-methylguanosine-3'-phosphate
  modified_base 12: mod_base = OTHER; note = 2'-O-methylguanosine-3'-phosphate
  modified_base 13: mod_base = OTHER; note = 2'-O-methyladenosine-3'-phosphate
  modified_base 14: mod_base = OTHER; note = 2'-fluoroadenosine-3'-phosphate
  modified_base 15: mod_base = OTHER; note = 2'-O-methyladenosine-3'-phosphate
  modified_base 16: mod_base = OTHER; note = 2'-fluoroadenosine-3'-phosphate
  modified_base 17: mod_base = OTHER; note = 2'-O-methylguanosine-3'-phosphate
  modified_base 18: mod_base = OTHER; note = 2'-O-methylguanosine-3'-phosphate
  modified_base 19: mod_base = OTHER; note = 2'-O-methylcytidine-3'-phosphate
  modified_base 20: mod_base = OTHER; note = 2'-O-methyluridine-3'-phosphate
  modified_base 21: mod_base = OTHER; note = 2'-O-methylguanosine-3'- phosphorothioate
  modified_base 22: mod_base = OTHER; note = 2'-O-methylcytidine-3'- phosphorothioate
  modified_base 23: mod_base = OTHER; note = 2'-O-methylcytidine-3'-phosphate
tgtgttctaaggaaaaggctgcc

SEQ ID NO: 3877 - RNA, 23 nt, synthetic construct
  source 1..23: mol_type = other RNA
  modified_base 1: mod_base = OTHER; note = 2'-O-methyluridine-3'-phosphorothioate
  modified_base 2: mod_base = OTHER; note = 2'-fluoroadenosine-3'-phosphorothioate
  modified_base 3: mod_base = OTHER; note = 2'-O-methyladenosine-3'-phosphate
  modified_base 4: mod_base = OTHER; note = 2'-O-methylcytidine-3'-phosphate
  modified_base 5: mod_base = OTHER; note = 2'-O-methyluridine-3'-phosphate
  modified_base 6: mod_base = OTHER; note = 2'-fluoroadenosine-3'-phosphate
  modified_base 7: mod_base = OTHER; note = 2'-O-methyluridine-3'-phosphate
  modified_base 8: mod_base = OTHER; note = 2'-fluorouridine-3'-phosphate
  modified_base 9: mod_base = OTHER; note = 2'-fluorouridine-3'-phosphate
  modified_base 10: mod_base = OTHER; note = 2'-O-methylcytidine-3'-phosphate
  modified_base 11: mod_base = OTHER; note = 2'-O-methyladenosine-3'-phosphate
  modified_base 12: mod_base = OTHER; note = 2'-O-methylcytidine-3'-phosphate
  modified_base 13: mod_base = OTHER; note = 2'-O-methyladenosine-3'-phosphate
  modified_base 14: mod_base = OTHER; note = 2'-fluorocytidine-3'-phosphate
  modified_base 15: mod_base = OTHER; note = 2'-O-methyluridine-3'-phosphate
  modified_base 16: mod_base = OTHER; note = 2'-fluoroadenosine-3'-phosphate
  modified_base 17: mod_base = OTHER; note = 2'-O-methyladenosine-3'-phosphate
  modified_base 18: mod_base = OTHER; note = 2'-O-methylcytidine-3'-phosphate
  modified_base 19: mod_base = OTHER; note = 2'-O-methylcytidine-3'-phosphate
  modified_base 20: mod_base = OTHER; note = 2'-O-methyladenosine-3'-phosphate
  modified_base 21: mod_base = OTHER; note = 2'-O-methylguanosine-3'- phosphorothioate
  modified_base 22: mod_base = OTHER; note = 2'-O-methyluridine-3'-phosphorothioate
  modified_base 23: mod_base = OTHER; note = 2'-O-methyluridine-3'-phosphate
taactatttcacactaaccagtt

SEQ ID NO: 3878 - RNA, 23 nt, synthetic construct
  source 1..23: mol_type = other RNA
  modified_base 1: mod_base = OTHER; note = 2'-O-methyladenosine-3'- phosphorothioate
  modified_base 2: mod_base = OTHER; note = 2'-fluoroadenosine-3'-phosphorothioate
  modified_base 3: mod_base = OTHER; note = 2'-O-methyluridine-3'-phosphate
  modified_base 4: mod_base = OTHER; note = 2'-O-methylguanosine-3'-phosphate
  modified_base 5: mod_base = OTHER; note = 2'-O-methyluridine-3'-phosphate
  modified_base 6: mod_base = OTHER; note = 2'-fluoroadenosine-3'-phosphate
  modified_base 7: mod_base = OTHER; note = 2'-O-methylcytidine-3'-phosphate
  modified_base 8: mod_base = OTHER; note = 2'-fluoroadenosine-3'-phosphate
  modified_base 9: mod_base = OTHER; note = 2'-fluorocytidine-3'-phosphate
  modified_base 10: mod_base = OTHER; note = 2'-O-methyluridine-3'-phosphate
  modified_base 11: mod_base = OTHER; note = 2'-O-methyladenosine-3'-phosphate
  modified_base 12: mod_base = OTHER; note = 2'-O-methylcytidine-3'-phosphate
  modified_base 13: mod_base = OTHER; note = 2'-O-methyluridine-3'-phosphate
  modified_base 14: mod_base = OTHER; note = 2'-fluoroguanosine-3'-phosphate
  modified_base 15: mod_base = OTHER; note = 2'-O-methyladenosine-3'-phosphate
  modified_base 16: mod_base = OTHER; note = 2'-fluorouridine-3'-phosphate
  modified_base 17: mod_base = OTHER; note = 2'-O-methyladenosine-3'-phosphate
  modified_base 18: mod_base = OTHER; note = 2'-O-methyluridine-3'-phosphate
  modified_base 19: mod_base = OTHER; note = 2'-O-methyladenosine-3'-phosphate
  modified_base 20: mod_base = OTHER; note = 2'-O-methylguanosine-3'-phosphate
  modified_base 21: mod_base = OTHER; note = 2'-O-methyluridine-3'-phosphorothioate
  modified_base 22: mod_base = OTHER; note = 2'-O-methyluridine-3'-phosphorothioate
  modified_base 23: mod_base = OTHER; note = 2'-O-methylcytidine-3'-phosphate
aatgtacactactgatatagttc

SEQ ID NO: 3879 - RNA, 23 nt, synthetic construct
  source 1..23: mol_type = other RNA
  modified_base 1: mod_base = OTHER; note = 2'-O-methyluridine-3'-phosphorothioate
  modified_base 2: mod_base = OTHER; note = 2'-fluorouridine -3'-phosphorothioate
  modified_base 3: mod_base = OTHER; note = 2'-O-methyladenosine-3'-phosphate
  modified_base 4: mod_base = OTHER; note = 2'-O-methyladenosine-3'-phosphate
  modified_base 5: mod_base = OTHER; note = 2'-O-methyluridine-3'-phosphate
  modified_base 6: mod_base = OTHER; note = 2'-fluoroguanosine-3'-phosphate
  modified_base 7: mod_base = OTHER; note = 2'-O-methyluridine-3'-phosphate
  modified_base 8: mod_base = OTHER; note = 2'-fluoroadenosine-3'-phosphate
  modified_base 9: mod_base = OTHER; note = 2'-fluorocytidine-3'-phosphate
  modified_base 10: mod_base = OTHER; note = 2'-O-methyladenosine-3'-phosphate
  modified_base 11: mod_base = OTHER; note = 2'-O-methylcytidine-3'-phosphate
  modified_base 12: mod_base = OTHER; note = 2'-O-methyluridine-3'-phosphate
  modified_base 13: mod_base = OTHER; note = 2'-O-methyladenosine-3'-phosphate
  modified_base 14: mod_base = OTHER; note = 2'-fluorocytidine-3'-phosphate
  modified_base 15: mod_base = OTHER; note = 2'-O-methyluridine-3'-phosphate
  modified_base 16: mod_base = OTHER; note = 2'-fluoroguanosine-3'-phosphate
  modified_base 17: mod_base = OTHER; note = 2'-O-methyladenosine-3'-phosphate
  modified_base 18: mod_base = OTHER; note = 2'-O-methyluridine-3'-phosphate
  modified_base 19: mod_base = OTHER; note = 2'-O-methyladenosine-3'-phosphate
  modified_base 20: mod_base = OTHER; note = 2'-O-methyluridine-3'-phosphate
  modified_base 21: mod_base = OTHER; note = 2'-O-methyladenosine-3'- phosphorothioate
  modified_base 22: mod_base = OTHER; note = 2'-O-methylguanosine-3'- phosphorothioate
  modified_base 23: mod_base = OTHER; note = 2'-O-methyluridine-3'-phosphate
ttaatgtacactactgatatagt

SEQ ID NO: 3880 - RNA, 23 nt, synthetic construct
  source 1..23: mol_type = other RNA
  modified_base 1: mod_base = OTHER; note = 2'-O-methyluridine-3'-phosphorothioate
  modified_base 2: mod_base = OTHER; note = 2'-fluoroadenosine-3'-phosphorothioate
  modified_base 3: mod_base = OTHER; note = 2'-O-methylguanosine-3'-phosphate
  modified_base 4: mod_base = OTHER; note = 2'-O-methyluridine-3'-phosphate
  modified_base 5: mod_base = OTHER; note = 2'-O-methylcytidine-3'-phosphate
  modified_base 6: mod_base = OTHER; note = 2'-fluorocytidine-3'-phosphate
  modified_base 7: mod_base = OTHER; note = 2'-O-methyladenosine-3'-phosphate
  modified_base 8: mod_base = OTHER; note = 2'-fluorouridine-3'-phosphate
  modified_base 9: mod_base = OTHER; note = 2'-fluorocytidine-3'-phosphate
  modified_base 10: mod_base = OTHER; note = 2'-O-methyluridine-3'-phosphate
  modified_base 11: mod_base = OTHER; note = 2'-O-methyluridine-3'-phosphate
  modified_base 12: mod_base = OTHER; note = 2'-O-methyladenosine-3'-phosphate
  modified_base 13: mod_base = OTHER; note = 2'-O-methyladenosine-3'-phosphate
  modified_base 14: mod_base = OTHER; note = 2'-fluoroadenosine-3'-phosphate
  modified_base 15: mod_base = OTHER; note = 2'-O-methyladenosine-3'-phosphate
  modified_base 16: mod_base = OTHER; note = 2'-fluorouridine-3'-phosphate
  modified_base 17: mod_base = OTHER; note = 2'-O-methyladenosine-3'-phosphate
  modified_base 18: mod_base = OTHER; note = 2'-O-methyluridine-3'-phosphate
  modified_base 19: mod_base = OTHER; note = 2'-O-methyluridine-3'-phosphate
  modified_base 20: mod_base = OTHER; note = 2'-O-methyladenosine-3'-phosphate
  modified_base 21: mod_base = OTHER; note = 2'-O-methylcytidine-3'- phosphorothioate
  modified_base 22: mod_base = OTHER; note = 2'-O-methyluridine-3'-phosphorothioate
  modified_base 23: mod_base = OTHER; note = 2'-O-methylguanosine-3'-phosphate
tagtccatcttaaaatattactg

SEQ ID NO: 3881 - RNA, 23 nt, synthetic construct
  source 1..23: mol_type = other RNA
  modified_base 1: mod_base = OTHER; note = 2'-O-methyluridine-3'-phosphorothioate
  modified_base 2: mod_base = OTHER; note = 2'-fluorouridine -3'-phosphorothioate
  modified_base 3: mod_base = OTHER; note = 2'-O-methyluridine-3'-phosphate
  modified_base 4: mod_base = OTHER; note = 2'-O-methyluridine-3'-phosphate
  modified_base 5: mod_base = OTHER; note = 2'-O-methylcytidine-3'-phosphate
  modified_base 6: mod_base = OTHER; note = 2'-fluorocytidine-3'-phosphate
  modified_base 7: mod_base = OTHER; note = 2'-O-methylcytidine-3'-phosphate
  modified_base 8: mod_base = OTHER; note = 2'-fluoroadenosine-3'-phosphate
  modified_base 9: mod_base = OTHER; note = 2'-fluoroguanosine-3'-phosphate
  modified_base 10: mod_base = OTHER; note = 2'-O-methyluridine-3'-phosphate
  modified_base 11: mod_base = OTHER; note = 2'-O-methylcytidine-3'-phosphate
  modified_base 12: mod_base = OTHER; note = 2'-O-methylcytidine-3'-phosphate
  modified_base 13: mod_base = OTHER; note = 2'-O-methyladenosine-3'-phosphate
  modified_base 14: mod_base = OTHER; note = 2'-fluorouridine-3'-phosphate
  modified_base 15: mod_base = OTHER; note = 2'-O-methylcytidine-3'-phosphate
  modified_base 16: mod_base = OTHER; note = 2'-fluorouridine-3'-phosphate
  modified_base 17: mod_base = OTHER; note = 2'-O-methyluridine-3'-phosphate
  modified_base 18: mod_base = OTHER; note = 2'-O-methyladenosine-3'-phosphate
  modified_base 19: mod_base = OTHER; note = 2'-O-methyladenosine-3'-phosphate
  modified_base 20: mod_base = OTHER; note = 2'-O-methyladenosine-3'-phosphate
  modified_base 21: mod_base = OTHER; note = 2'-O-methyladenosine-3'- phosphorothioate
  modified_base 22: mod_base = OTHER; note = 2'-O-methyluridine-3'-phosphorothioate
  modified_base 23: mod_base = OTHER; note = 2'-O-methyladenosine-3'-phosphate
ttttcccagtccatcttaaaata

SEQ ID NO: 3882 - RNA, 23 nt, synthetic construct
  source 1..23: mol_type = other RNA
  modified_base 1: mod_base = OTHER; note = 2'-O-methyluridine-3'-phosphorothioate
  modified_base 2: mod_base = OTHER; note = 2'-fluoroguanosine-3'-phosphorothioate
  modified_base 3: mod_base = OTHER; note = 2'-O-methyladenosine-3'-phosphate
  modified_base 4: mod_base = OTHER; note = 2'-O-methylcytidine-3'-phosphate
  modified_base 5: mod_base = OTHER; note = 2'-O-methyluridine-3'-phosphate
  modified_base 6: mod_base = OTHER; note = 2'-fluoroadenosine-3'-phosphate
  modified_base 7: mod_base = OTHER; note = 2'-O-methylguanosine-3'-phosphate
  modified_base 8: mod_base = OTHER; note = 2'-fluoroguanosine-3'-phosphate
  modified_base 9: mod_base = OTHER; note = 2'-fluorocytidine-3'-phosphate
  modified_base 10: mod_base = OTHER; note = 2'-O-methyladenosine-3'-phosphate
  modified_base 11: mod_base = OTHER; note = 2'-O-methyluridine-3'-phosphate
  modified_base 12: mod_base = OTHER; note = 2'-O-methylguanosine-3'-phosphate
  modified_base 13: mod_base = OTHER; note = 2'-O-methyluridine-3'-phosphate
  modified_base 14: mod_base = OTHER; note = 2'-fluorouridine-3'-phosphate
  modified_base 15: mod_base = OTHER; note = 2'-O-methylcytidine-3'-phosphate
  modified_base 16: mod_base = OTHER; note = 2'-fluoroadenosine-3'-phosphate
  modified_base 17: mod_base = OTHER; note = 2'-O-methylguanosine-3'-phosphate
  modified_base 18: mod_base = OTHER; note = 2'-O-methyluridine-3'-phosphate
  modified_base 19: mod_base = OTHER; note = 2'-O-methylguanosine-3'-phosphate
  modified_base 20: mod_base = OTHER; note = 2'-O-methyladenosine-3'-phosphate
  modified_base 21: mod_base = OTHER; note = 2'-O-methyladenosine-3'- phosphorothioate
  modified_base 22: mod_base = OTHER; note = 2'-O-methylguanosine-3'- phosphorothioate
  modified_base 23: mod_base = OTHER; note = 2'-O-methylguanosine-3'-phosphate
tgactaggcatgttcagtgaagg

SEQ ID NO: 3883 - RNA, 23 nt, synthetic construct
  source 1..23: mol_type = other RNA
  modified_base 1: mod_base = OTHER; note = 2'-O-methyluridine-3'-phosphorothioate
  modified_base 2: mod_base = OTHER; note = 2'-fluoroadenosine-3'-phosphorothioate
  modified_base 3: mod_base = OTHER; note = 2'-O-methyluridine-3'-phosphate
  modified_base 4: mod_base = OTHER; note = 2'-O-methyladenosine-3'-phosphate
  modified_base 5: mod_base = OTHER; note = 2'-O-methyladenosine-3'-phosphate
  modified_base 6: mod_base = OTHER; note = 2'-fluorocytidine-3'-phosphate
  modified_base 7: mod_base = OTHER; note = 2'-O-methyladenosine-3'-phosphate
  modified_base 8: mod_base = OTHER; note = 2'-fluorocytidine-3'-phosphate
  modified_base 9: mod_base = OTHER; note = 2'-fluorouridine-3'-phosphate
  modified_base 10: mod_base = OTHER; note = 2'-O-methyluridine-3'-phosphate
  modified_base 11: mod_base = OTHER; note = 2'-O-methylguanosine-3'-phosphate
  modified_base 12: mod_base = OTHER; note = 2'-O-methylguanosine-3'-phosphate
  modified_base 13: mod_base = OTHER; note = 2'-O-methyladenosine-3'-phosphate
  modified_base 14: mod_base = OTHER; note = 2'-fluorouridine-3'-phosphate
  modified_base 15: mod_base = OTHER; note = 2'-O-methyladenosine-3'-phosphate
  modified_base 16: mod_base = OTHER; note = 2'-fluoroguanosine-3'-phosphate
  modified_base 17: mod_base = OTHER; note = 2'-O-methyluridine-3'-phosphate
  modified_base 18: mod_base = OTHER; note = 2'-O-methyluridine-3'-phosphate
  modified_base 19: mod_base = OTHER; note = 2'-O-methylguanosine-3'-phosphate
  modified_base 20: mod_base = OTHER; note = 2'-O-methylguanosine-3'-phosphate
  modified_base 21: mod_base = OTHER; note = 2'-O-methyluridine-3'-phosphorothioate
  modified_base 22: mod_base = OTHER; note = 2'-O-methyluridine-3'-phosphorothioate
  modified_base 23: mod_base = OTHER; note = 2'-O-methylguanosine-3'-phosphate
tataacacttggatagttggttg

SEQ ID NO: 3884 - RNA, 23 nt, synthetic construct
  source 1..23: mol_type = other RNA
  modified_base 1: mod_base = OTHER; note = 2'-O-methyluridine-3'-phosphorothioate
  modified_base 2: mod_base = OTHER; note = 2'-fluorouridine -3'-phosphorothioate
  modified_base 3: mod_base = OTHER; note = 2'-O-methyluridine-3'-phosphate
  modified_base 4: mod_base = OTHER; note = 2'-O-methyladenosine-3'-phosphate
  modified_base 5: mod_base = OTHER; note = 2'-O-methylguanosine-3'-phosphate
  modified_base 6: mod_base = OTHER; note = 2'-fluorouridine-3'-phosphate
  modified_base 7: mod_base = OTHER; note = 2'-O-methyluridine-3'-phosphate
  modified_base 8: mod_base = OTHER; note = 2'-fluoroguanosine-3'-phosphate
  modified_base 9: mod_base = OTHER; note = 2'-fluoroguanosine-3'-phosphate
  modified_base 10: mod_base = OTHER; note = 2'-O-methyluridine-3'-phosphate
  modified_base 11: mod_base = OTHER; note = 2'-O-methyladenosine-3'-phosphate
  modified_base 12: mod_base = OTHER; note = 2'-O-methyluridine-3'-phosphate
  modified_base 13: mod_base = OTHER; note = 2'-O-methyladenosine-3'-phosphate
  modified_base 14: mod_base = OTHER; note = 2'-fluoroadenosine-3'-phosphate
  modified_base 15: mod_base = OTHER; note = 2'-O-methylcytidine-3'-phosphate
  modified_base 16: mod_base = OTHER; note = 2'-fluoroadenosine-3'-phosphate
  modified_base 17: mod_base = OTHER; note = 2'-O-methylcytidine-3'-phosphate
  modified_base 18: mod_base = OTHER; note = 2'-O-methyluridine-3'-phosphate
  modified_base 19: mod_base = OTHER; note = 2'-O-methyluridine-3'-phosphate
  modified_base 20: mod_base = OTHER; note = 2'-O-methylguanosine-3'-phosphate
  modified_base 21: mod_base = OTHER; note = 2'-O-methylguanosine-3'- phosphorothioate
  modified_base 22: mod_base = OTHER; note = 2'-O-methyladenosine-3'- phosphorothioate
  modified_base 23: mod_base = OTHER; note = 2'-O-methyluridine-3'-phosphate
tttagttggtataacacttggat

SEQ ID NO: 3885 - RNA, 23 nt, synthetic construct
  source 1..23: mol_type = other RNA
  modified_base 1: mod_base = OTHER; note = 2'-O-methyladenosine-3'- phosphorothioate
  modified_base 2: mod_base = OTHER; note = 2'-fluoroguanosine-3'-phosphorothioate
  modified_base 3: mod_base = OTHER; note = 2'-O-methyluridine-3'-phosphate
  modified_base 4: mod_base = OTHER; note = 2'-O-methylcytidine-3'-phosphate
  modified_base 5: mod_base = OTHER; note = 2'-O-methylcytidine-3'-phosphate
  modified_base 6: mod_base = OTHER; note = 2'-fluoroadenosine-3'-phosphate
  modified_base 7: mod_base = OTHER; note = 2'-O-methyluridine-3'-phosphate
  modified_base 8: mod_base = OTHER; note = 2'-fluorocytidine-3'-phosphate
  modified_base 9: mod_base = OTHER; note = 2'-fluorouridine-3'-phosphate
  modified_base 10: mod_base = OTHER; note = 2'-O-methyluridine-3'-phosphate
  modified_base 11: mod_base = OTHER; note = 2'-O-methyladenosine-3'-phosphate
  modified_base 12: mod_base = OTHER; note = 2'-O-methyladenosine-3'-phosphate
  modified_base 13: mod_base = OTHER; note = 2'-O-methyladenosine-3'-phosphate
  modified_base 14: mod_base = OTHER; note = 2'-fluoroadenosine-3'-phosphate
  modified_base 15: mod_base = OTHER; note = 2'-O-methyluridine-3'-phosphate
  modified_base 16: mod_base = OTHER; note = 2'-fluoroadenosine-3'-phosphate
  modified_base 17: mod_base = OTHER; note = 2'-O-methyluridine-3'-phosphate
  modified_base 18: mod_base = OTHER; note = 2'-O-methyluridine-3'-phosphate
  modified_base 19: mod_base = OTHER; note = 2'-O-methyladenosine-3'-phosphate
  modified_base 20: mod_base = OTHER; note = 2'-O-methylcytidine-3'-phosphate
  modified_base 21: mod_base = OTHER; note = 2'-O-methyluridine-3'-phosphorothioate
  modified_base 22: mod_base = OTHER; note = 2'-O-methylguanosine-3'- phosphorothioate
  modified_base 23: mod_base = OTHER; note = 2'-O-methylcytidine-3'-phosphate
agtccatcttaaaatattactgc

SEQ ID NO: 3886 - RNA, 23 nt, synthetic construct
  source 1..23: mol_type = other RNA
  modified_base 1: mod_base = OTHER; note = 2'-O-methyluridine-3'-phosphorothioate
  modified_base 2: mod_base = OTHER; note = 2'-fluoroadenosine-3'-phosphorothioate
  modified_base 3: mod_base = OTHER; note = 2'-O-methylguanosine-3'-phosphate
  modified_base 4: mod_base = OTHER; note = 2'-O-methylguanosine-3'-phosphate
  modified_base 5: mod_base = OTHER; note = 2'-O-methyladenosine-3'-phosphate
  modified_base 6: mod_base = OTHER; note = 2'-fluorouridine-3'-phosphate
  modified_base 7: mod_base = OTHER; note = 2'-O-methyladenosine-3'-phosphate
  modified_base 8: mod_base = OTHER; note = 2'-fluorouridine-3'-phosphate
  modified_base 9: mod_base = OTHER; note = 2'-fluoroadenosine-3'-phosphate
  modified_base 10: mod_base = OTHER; note = 2'-O-methylguanosine-3'-phosphate
  modified_base 11: mod_base = OTHER; note = 2'-O-methylcytidine-3'-phosphate
  modified_base 12: mod_base = OTHER; note = 2'-O-methyluridine-3'-phosphate
  modified_base 13: mod_base = OTHER; note = 2'-O-methylguanosine-3'-phosphate
  modified_base 14: mod_base = OTHER; note = 2'-fluorouridine-3'-phosphate
  modified_base 15: mod_base = OTHER; note = 2'-O-methylguanosine-3'-phosphate
  modified_base 16: mod_base = OTHER; note = 2'-fluoroguanosine-3'-phosphate
  modified_base 17: mod_base = OTHER; note = 2'-O-methyladenosine-3'-phosphate
  modified_base 18: mod_base = OTHER; note = 2'-O-methyluridine-3'-phosphate
  modified_base 19: mod_base = OTHER; note = 2'-O-methyluridine-3'-phosphate
  modified_base 20: mod_base = OTHER; note = 2'-O-methyluridine-3'-phosphate
  modified_base 21: mod_base = OTHER; note = 2'-O-methyluridine-3'-phosphorothioate
  modified_base 22: mod_base = OTHER; note = 2'-O-methyladenosine-3'- phosphorothioate
  modified_base 23: mod_base = OTHER; note = 2'-O-methylcytidine-3'-phosphate
taggatatagctgtggattttac

SEQ ID NO: 3887 - RNA, 23 nt, synthetic construct
  source 1..23: mol_type = other RNA
  modified_base 1: mod_base = OTHER; note = 2'-O-methyluridine-3'-phosphorothioate
  modified_base 2: mod_base = OTHER; note = 2'-fluorouridine -3'-phosphorothioate
  modified_base 3: mod_base = OTHER; note = 2'-O-methyladenosine-3'-phosphate
  modified_base 4: mod_base = OTHER; note = 2'-O-methylguanosine-3'-phosphate
  modified_base 5: mod_base = OTHER; note = 2'-O-methylguanosine-3'-phosphate
  modified_base 6: mod_base = OTHER; note = 2'-fluorocytidine-3'-phosphate
  modified_base 7: mod_base = OTHER; note = 2'-O-methyladenosine-3'-phosphate
  modified_base 8: mod_base = OTHER; note = 2'-fluorouridine-3'-phosphate
  modified_base 9: mod_base = OTHER; note = 2'-fluoroguanosine-3'-phosphate
  modified_base 10: mod_base = OTHER; note = 2'-O-methyluridine-3'-phosphate
  modified_base 11: mod_base = OTHER; note = 2'-O-methyluridine-3'-phosphate
  modified_base 12: mod_base = OTHER; note = 2'-O-methylcytidine-3'-phosphate
  modified_base 13: mod_base = OTHER; note = 2'-O-methyladenosine-3'-phosphate
  modified_base 14: mod_base = OTHER; note = 2'-fluoroguanosine-3'-phosphate
  modified_base 15: mod_base = OTHER; note = 2'-O-methyluridine-3'-phosphate
  modified_base 16: mod_base = OTHER; note = 2'-fluoroguanosine-3'-phosphate
  modified_base 17: mod_base = OTHER; note = 2'-O-methyladenosine-3'-phosphate
  modified_base 18: mod_base = OTHER; note = 2'-O-methyladenosine-3'-phosphate
  modified_base 19: mod_base = OTHER; note = 2'-O-methylguanosine-3'-phosphate
  modified_base 20: mod_base = OTHER; note = 2'-O-methylguanosine-3'-phosphate
  modified_base 21: mod_base = OTHER; note = 2'-O-methyladenosine-3'- phosphorothioate
  modified_base 22: mod_base = OTHER; note = 2'-O-methylguanosine-3'- phosphorothioate
  modified_base 23: mod_base = OTHER; note = 2'-O-methylcytidine-3'-phosphate
ttaggcatgttcagtgaaggagc

SEQ ID NO: 3888 - RNA, 23 nt, synthetic construct
  source 1..23: mol_type = other RNA
  modified_base 1: mod_base = OTHER; note = 2'-O-methyluridine-3'-phosphorothioate
  modified_base 2: mod_base = OTHER; note = 2'-fluorouridine -3'-phosphorothioate
  modified_base 3: mod_base = OTHER; note = 2'-O-methylguanosine-3'-phosphate
  modified_base 4: mod_base = OTHER; note = 2'-O-methylguanosine-3'-phosphate
  modified_base 5: mod_base = OTHER; note = 2'-O-methyladenosine-3'-phosphate
  modified_base 6: mod_base = OTHER; note = 2'-fluorocytidine-3'-phosphate
  modified_base 7: mod_base = OTHER; note = 2'-O-methyluridine-3'-phosphate
  modified_base 8: mod_base = OTHER; note = 2'-fluoroadenosine-3'-phosphate
  modified_base 9: mod_base = OTHER; note = 2'-fluoroguanosine-3'-phosphate
  modified_base 10: mod_base = OTHER; note = 2'-O-methylguanosine-3'-phosphate
  modified_base 11: mod_base = OTHER; note = 2'-O-methylcytidine-3'-phosphate
  modified_base 12: mod_base = OTHER; note = 2'-O-methyladenosine-3'-phosphate
  modified_base 13: mod_base = OTHER; note = 2'-O-methyluridine-3'-phosphate
  modified_base 14: mod_base = OTHER; note = 2'-fluoroguanosine-3'-phosphate
  modified_base 15: mod_base = OTHER; note = 2'-O-methyluridine-3'-phosphate
  modified_base 16: mod_base = OTHER; note = 2'-fluorouridine-3'-phosphate
  modified_base 17: mod_base = OTHER; note = 2'-O-methylcytidine-3'-phosphate
  modified_base 18: mod_base = OTHER; note = 2'-O-methyladenosine-3'-phosphate
  modified_base 19: mod_base = OTHER; note = 2'-O-methylguanosine-3'-phosphate
  modified_base 20: mod_base = OTHER; note = 2'-O-methyluridine-3'-phosphate
  modified_base 21: mod_base = OTHER; note = 2'-O-methylguanosine-3'- phosphorothioate
  modified_base 22: mod_base = OTHER; note = 2'-O-methyladenosine-3'- phosphorothioate
  modified_base 23: mod_base = OTHER; note = 2'-O-methyladenosine-3'-phosphate
ttggactaggcatgttcagtgaa

SEQ ID NO: 3889 - RNA, 23 nt, synthetic construct
  source 1..23: mol_type = other RNA
  modified_base 1: mod_base = OTHER; note = 2'-O-methylguanosine-3'- phosphorothioate
  modified_base 2: mod_base = OTHER; note = 2'-fluorouridine -3'-phosphorothioate
  modified_base 3: mod_base = OTHER; note = 2'-O-methyluridine-3'-phosphate
  modified_base 4: mod_base = OTHER; note = 2'-O-methyluridine-3'-phosphate
  modified_base 5: mod_base = OTHER; note = 2'-O-methyluridine-3'-phosphate
  modified_base 6: mod_base = OTHER; note = 2'-fluoroadenosine-3'-phosphate
  modified_base 7: mod_base = OTHER; note = 2'-O-methylguanosine-3'-phosphate
  modified_base 8: mod_base = OTHER; note = 2'-fluorouridine-3'-phosphate
  modified_base 9: mod_base = OTHER; note = 2'-fluorouridine-3'-phosphate
  modified_base 10: mod_base = OTHER; note = 2'-O-methylguanosine-3'-phosphate
  modified_base 11: mod_base = OTHER; note = 2'-O-methylguanosine-3'-phosphate
  modified_base 12: mod_base = OTHER; note = 2'-O-methyluridine-3'-phosphate
  modified_base 13: mod_base = OTHER; note = 2'-O-methyladenosine-3'-phosphate
  modified_base 14: mod_base = OTHER; note = 2'-fluorouridine-3'-phosphate
  modified_base 15: mod_base = OTHER; note = 2'-O-methyladenosine-3'-phosphate
  modified_base 16: mod_base = OTHER; note = 2'-fluoroadenosine-3'-phosphate
  modified_base 17: mod_base = OTHER; note = 2'-O-methylcytidine-3'-phosphate
  modified_base 18: mod_base = OTHER; note = 2'-O-methyladenosine-3'-phosphate
  modified_base 19: mod_base = OTHER; note = 2'-O-methylcytidine-3'-phosphate
  modified_base 20: mod_base = OTHER; note = 2'-O-methyluridine-3'-phosphate
  modified_base 21: mod_base = OTHER; note = 2'-O-methyluridine-3'-phosphorothioate
  modified_base 22: mod_base = OTHER; note = 2'-O-methylguanosine-3'- phosphorothioate
  modified_base 23: mod_base = OTHER; note = 2'-O-methylguanosine-3'-phosphate
gttttagttggtataacacttgg

SEQ ID NO: 3890 - RNA, 23 nt, synthetic construct
  source 1..23: mol_type = other RNA
  modified_base 1: mod_base = OTHER; note = 2'-O-methyladenosine-3'- phosphorothioate
  modified_base 2: mod_base = OTHER; note = 2'-fluoroguanosine-3'-phosphorothioate
  modified_base 3: mod_base = OTHER; note = 2'-O-methyladenosine-3'-phosphate
  modified_base 4: mod_base = OTHER; note = 2'-O-methylcytidine-3'-phosphate
  modified_base 5: mod_base = OTHER; note = 2'-O-methylcytidine-3'-phosphate
  modified_base 6: mod_base = OTHER; note = 2'-fluorocytidine-3'-phosphate
  modified_base 7: mod_base = OTHER; note = 2'-O-methyluridine-3'-phosphate
  modified_base 8: mod_base = OTHER; note = 2'-fluorouridine-3'-phosphate
  modified_base 9: mod_base = OTHER; note = 2'-fluoroadenosine-3'-phosphate
  modified_base 10: mod_base = OTHER; note = 2'-O-methyladenosine-3'-phosphate
  modified_base 11: mod_base = OTHER; note = 2'-O-methyluridine-3'-phosphate
  modified_base 12: mod_base = OTHER; note = 2'-O-methylcytidine-3'-phosphate
  modified_base 13: mod_base = OTHER; note = 2'-O-methyladenosine-3'-phosphate
  modified_base 14: mod_base = OTHER; note = 2'-fluorouridine-3'-phosphate
  modified_base 15: mod_base = OTHER; note = 2'-O-methylguanosine-3'-phosphate
  modified_base 16: mod_base = OTHER; note = 2'-fluoroguanosine-3'-phosphate
  modified_base 17: mod_base = OTHER; note = 2'-O-methyluridine-3'-phosphate
  modified_base 18: mod_base = OTHER; note = 2'-O-methylguanosine-3'-phosphate
  modified_base 19: mod_base = OTHER; note = 2'-O-methylguanosine-3'-phosphate
  modified_base 20: mod_base = OTHER; note = 2'-O-methyladenosine-3'-phosphate
  modified_base 21: mod_base = OTHER; note = 2'-O-methyladenosine-3'- phosphorothioate
  modified_base 22: mod_base = OTHER; note = 2'-O-methyladenosine-3'- phosphorothioate
  modified_base 23: mod_base = OTHER; note = 2'-O-methylcytidine-3'-phosphate
agacccttaatcatggtggaaac

SEQ ID NO: 3891 - RNA, 23 nt, synthetic construct
  source 1..23: mol_type = other RNA
  modified_base 1: mod_base = OTHER; note = 2'-O-methyladenosine-3'- phosphorothioate
  modified_base 2: mod_base = OTHER; note = 2'-fluoroadenosine-3'-phosphorothioate
  modified_base 3: mod_base = OTHER; note = 2'-O-methyluridine-3'-phosphate
  modified_base 4: mod_base = OTHER; note = 2'-O-methylguanosine-3'-phosphate
  modified_base 5: mod_base = OTHER; note = 2'-O-methyluridine-3'-phosphate
  modified_base 6: mod_base = OTHER; note = 2'-fluorouridine-3'-phosphate
  modified_base 7: mod_base = OTHER; note = 2'-O-methylguanosine-3'-phosphate
  modified_base 8: mod_base = OTHER; note = 2'-fluoroguanosine-3'-phosphate
  modified_base 9: mod_base = OTHER; note = 2'-fluoroadenosine-3'-phosphate
  modified_base 10: mod_base = OTHER; note = 2'-O-methylcytidine-3'-phosphate
  modified_base 11: mod_base = OTHER; note = 2'-O-methyluridine-3'-phosphate
  modified_base 12: mod_base = OTHER; note = 2'-O-methyladenosine-3'-phosphate
  modified_base 13: mod_base = OTHER; note = 2'-O-methylguanosine-3'-phosphate
  modified_base 14: mod_base = OTHER; note = 2'-fluoroguanosine-3'-phosphate
  modified_base 15: mod_base = OTHER; note = 2'-O-methylcytidine-3'-phosphate
  modified_base 16: mod_base = OTHER; note = 2'-fluoroadenosine-3'-phosphate
  modified_base 17: mod_base = OTHER; note = 2'-O-methyluridine-3'-phosphate
  modified_base 18: mod_base = OTHER; note = 2'-O-methylguanosine-3'-phosphate
  modified_base 19: mod_base = OTHER; note = 2'-O-methyluridine-3'-phosphate
  modified_base 20: mod_base = OTHER; note = 2'-O-methyluridine-3'-phosphate
  modified_base 21: mod_base = OTHER; note = 2'-O-methylcytidine-3'- phosphorothioate
  modified_base 22: mod_base = OTHER; note = 2'-O-methyladenosine-3'- phosphorothioate
  modified_base 23: mod_base = OTHER; note = 2'-O-methylguanosine-3'-phosphate
aatgttggactaggcatgttcag

SEQ ID NO: 3892 - RNA, 23 nt, synthetic construct
  source 1..23: mol_type = other RNA
  modified_base 1: mod_base = OTHER; note = 2'-O-methyladenosine-3'- phosphorothioate
  modified_base 2: mod_base = OTHER; note = 2'-fluorouridine -3'-phosphorothioate
  modified_base 3: mod_base = OTHER; note = 2'-O-methylguanosine-3'-phosphate
  modified_base 4: mod_base = OTHER; note = 2'-O-methylguanosine-3'-phosphate
  modified_base 5: mod_base = OTHER; note = 2'-O-methyluridine-3'-phosphate
  modified_base 6: mod_base = OTHER; note = 2'-fluoroadenosine-3'-phosphate
  modified_base 7: mod_base = OTHER; note = 2'-O-methyladenosine-3'-phosphate
  modified_base 8: mod_base = OTHER; note = 2'-fluorouridine-3'-phosphate
  modified_base 9: mod_base = OTHER; note = 2'-fluoroguanosine-3'-phosphate
  modified_base 10: mod_base = OTHER; note = 2'-O-methyluridine-3'-phosphate
  modified_base 11: mod_base = OTHER; note = 2'-O-methyladenosine-3'-phosphate
  modified_base 12: mod_base = OTHER; note = 2'-O-methylcytidine-3'-phosphate
  modified_base 13: mod_base = OTHER; note = 2'-O-methyladenosine-3'-phosphate
  modified_base 14: mod_base = OTHER; note = 2'-fluorocytidine-3'-phosphate
  modified_base 15: mod_base = OTHER; note = 2'-O-methyluridine-3'-phosphate
  modified_base 16: mod_base = OTHER; note = 2'-fluoroadenosine-3'-phosphate
  modified_base 17: mod_base = OTHER; note = 2'-O-methylcytidine-3'-phosphate
  modified_base 18: mod_base = OTHER; note = 2'-O-methyluridine-3'-phosphate
  modified_base 19: mod_base = OTHER; note = 2'-O-methylguanosine-3'-phosphate
  modified_base 20: mod_base = OTHER; note = 2'-O-methyladenosine-3'-phosphate
  modified_base 21: mod_base = OTHER; note = 2'-O-methyluridine-3'-phosphorothioate
  modified_base 22: mod_base = OTHER; note = 2'-O-methyladenosine-3'- phosphorothioate
  modified_base 23: mod_base = OTHER; note = 2'-O-methyluridine-3'-phosphate
atggtaatgtacactactgatat

SEQ ID NO: 3893 - RNA, 23 nt, synthetic construct
  source 1..23: mol_type = other RNA
  modified_base 1: mod_base = OTHER; note = 2'-O-methyluridine-3'-phosphorothioate
  modified_base 2: mod_base = OTHER; note = 2'-fluoroadenosine-3'-phosphorothioate
  modified_base 3: mod_base = OTHER; note = 2'-O-methylguanosine-3'-phosphate
  modified_base 4: mod_base = OTHER; note = 2'-O-methyluridine-3'-phosphate
  modified_base 5: mod_base = OTHER; note = 2'-O-methyluridine-3'-phosphate
  modified_base 6: mod_base = OTHER; note = 2'-fluoroguanosine-3'-phosphate
  modified_base 7: mod_base = OTHER; note = 2'-O-methylguanosine-3'-phosphate
  modified_base 8: mod_base = OTHER; note = 2'-fluorouridine-3'-phosphate
  modified_base 9: mod_base = OTHER; note = 2'-fluoroadenosine-3'-phosphate
  modified_base 10: mod_base = OTHER; note = 2'-O-methyluridine-3'-phosphate
  modified_base 11: mod_base = OTHER; note = 2'-O-methyladenosine-3'-phosphate
  modified_base 12: mod_base = OTHER; note = 2'-O-methyladenosine-3'-phosphate
  modified_base 13: mod_base = OTHER; note = 2'-O-methylcytidine-3'-phosphate
  modified_base 14: mod_base = OTHER; note = 2'-fluoroadenosine-3'-phosphate
  modified_base 15: mod_base = OTHER; note = 2'-O-methylcytidine-3'-phosphate
  modified_base 16: mod_base = OTHER; note = 2'-fluorouridine-3'-phosphate
  modified_base 17: mod_base = OTHER; note = 2'-O-methyluridine-3'-phosphate
  modified_base 18: mod_base = OTHER; note = 2'-O-methylguanosine-3'-phosphate
  modified_base 19: mod_base = OTHER; note = 2'-O-methylguanosine-3'-phosphate
  modified_base 20: mod_base = OTHER; note = 2'-O-methyladenosine-3'-phosphate
  modified_base 21: mod_base = OTHER; note = 2'-O-methyluridine-3'-phosphorothioate
  modified_base 22: mod_base = OTHER; note = 2'-O-methyladenosine-3'- phosphorothioate
  modified_base 23: mod_base = OTHER; note = 2'-O-methylguanosine-3'-phosphate
tagttggtataacacttggatag

SEQ ID NO: 3894 - RNA, 23 nt, synthetic construct
  source 1..23: mol_type = other RNA
  modified_base 1: mod_base = OTHER; note = 2'-O-methyluridine-3'-phosphorothioate
  modified_base 2: mod_base = OTHER; note = 2'-fluoroadenosine-3'-phosphorothioate
  modified_base 3: mod_base = OTHER; note = 2'-O-methylguanosine-3'-phosphate
  modified_base 4: mod_base = OTHER; note = 2'-O-methyluridine-3'-phosphate
  modified_base 5: mod_base = OTHER; note = 2'-O-methyluridine-3'-phosphate
  modified_base 6: mod_base = OTHER; note = 2'-fluoroguanosine-3'-phosphate
  modified_base 7: mod_base = OTHER; note = 2'-O-methylcytidine-3'-phosphate
  modified_base 8: mod_base = OTHER; note = 2'-fluorocytidine-3'-phosphate
  modified_base 9: mod_base = OTHER; note = 2'-fluoroadenosine-3'-phosphate
  modified_base 10: mod_base = OTHER; note = 2'-O-methyluridine-3'-phosphate
  modified_base 11: mod_base = OTHER; note = 2'-O-methyladenosine-3'-phosphate
  modified_base 12: mod_base = OTHER; note = 2'-O-methyluridine-3'-phosphate
  modified_base 13: mod_base = OTHER; note = 2'-O-methyluridine-3'-phosphate
  modified_base 14: mod_base = OTHER; note = 2'-fluoroguanosine-3'-phosphate
  modified_base 15: mod_base = OTHER; note = 2'-O-methylguanosine-3'-phosphate
  modified_base 16: mod_base = OTHER; note = 2'-fluoroadenosine-3'-phosphate
  modified_base 17: mod_base = OTHER; note = 2'-O-methylcytidine-3'-phosphate
  modified_base 18: mod_base = OTHER; note = 2'-O-methyluridine-3'-phosphate
  modified_base 19: mod_base = OTHER; note = 2'-O-methyluridine-3'-phosphate
  modified_base 20: mod_base = OTHER; note = 2'-O-methylguanosine-3'-phosphate
  modified_base 21: mod_base = OTHER; note = 2'-O-methylguanosine-3'- phosphorothioate
  modified_base 22: mod_base = OTHER; note = 2'-O-methyladenosine-3'- phosphorothioate
  modified_base 23: mod_base = OTHER; note = 2'-O-methyladenosine-3'-phosphate
tagttgccatattggacttggaa

SEQ ID NO: 3895 - RNA, 23 nt, synthetic construct
  source 1..23: mol_type = other RNA
  modified_base 1: mod_base = OTHER; note = 2'-O-methyluridine-3'-phosphorothioate
  modified_base 2: mod_base = OTHER; note = 2'-fluoroguanosine-3'-phosphorothioate
  modified_base 3: mod_base = OTHER; note = 2'-O-methyluridine-3'-phosphate
  modified_base 4: mod_base = OTHER; note = 2'-O-methyladenosine-3'-phosphate
  modified_base 5: mod_base = OTHER; note = 2'-O-methylguanosine-3'-phosphate
  modified_base 6: mod_base = OTHER; note = 2'-fluorocytidine-3'-phosphate
  modified_base 7: mod_base = OTHER; note = 2'-O-methylcytidine-3'-phosphate
  modified_base 8: mod_base = OTHER; note = 2'-fluorouridine-3'-phosphate
  modified_base 9: mod_base = OTHER; note = 2'-fluoroadenosine-3'-phosphate
  modified_base 10: mod_base = OTHER; note = 2'-O-methylguanosine-3'-phosphate
  modified_base 11: mod_base = OTHER; note = 2'-O-methyladenosine-3'-phosphate
  modified_base 12: mod_base = OTHER; note = 2'-O-methylcytidine-3'-phosphate
  modified_base 13: mod_base = OTHER; note = 2'-O-methyladenosine-3'-phosphate
  modified_base 14: mod_base = OTHER; note = 2'-fluoroguanosine-3'-phosphate
  modified_base 15: mod_base = OTHER; note = 2'-O-methyluridine-3'-phosphate
  modified_base 16: mod_base = OTHER; note = 2'-fluoroguanosine-3'-phosphate
  modified_base 17: mod_base = OTHER; note = 2'-O-methyladenosine-3'-phosphate
  modified_base 18: mod_base = OTHER; note = 2'-O-methyladenosine-3'-phosphate
  modified_base 19: mod_base = OTHER; note = 2'-O-methyladenosine-3'-phosphate
  modified_base 20: mod_base = OTHER; note = 2'-O-methyluridine-3'-phosphate
  modified_base 21: mod_base = OTHER; note = 2'-O-methylguanosine-3'- phosphorothioate
  modified_base 22: mod_base = OTHER; note = 2'-O-methyladenosine-3'- phosphorothioate
  modified_base 23: mod_base = OTHER; note = 2'-O-methyluridine-3'-phosphate
tgtagcctagacagtgaaatgat

SEQ ID NO: 3896 - RNA, 23 nt, synthetic construct
  source 1..23: mol_type = other RNA
  modified_base 1: mod_base = OTHER; note = 2'-O-methyladenosine-3'- phosphorothioate
  modified_base 2: mod_base = OTHER; note = 2'-fluoroguanosine-3'-phosphorothioate
  modified_base 3: mod_base = OTHER; note = 2'-O-methylcytidine-3'-phosphate
  modified_base 4: mod_base = OTHER; note = 2'-O-methyladenosine-3'-phosphate
  modified_base 5: mod_base = OTHER; note = 2'-O-methyluridine-3'-phosphate
  modified_base 6: mod_base = OTHER; note = 2'-fluorocytidine-3'-phosphate
  modified_base 7: mod_base = OTHER; note = 2'-O-methyladenosine-3'-phosphate
  modified_base 8: mod_base = OTHER; note = 2'-fluoroguanosine-3'-phosphate
  modified_base 9: mod_base = OTHER; note = 2'-fluoroguanosine-3'-phosphate
  modified_base 10: mod_base = OTHER; note = 2'-O-methyladenosine-3'-phosphate
  modified_base 11: mod_base = OTHER; note = 2'-O-methyluridine-3'-phosphate
  modified_base 12: mod_base = OTHER; note = 2'-O-methyladenosine-3'-phosphate
  modified_base 13: mod_base = OTHER; note = 2'-O-methyluridine-3'-phosphate
  modified_base 14: mod_base = OTHER; note = 2'-fluoroadenosine-3'-phosphate
  modified_base 15: mod_base = OTHER; note = 2'-O-methylguanosine-3'-phosphate
  modified_base 16: mod_base = OTHER; note = 2'-fluorocytidine-3'-phosphate
  modified_base 17: mod_base = OTHER; note = 2'-O-methyluridine-3'-phosphate
  modified_base 18: mod_base = OTHER; note = 2'-O-methylguanosine-3'-phosphate
  modified_base 19: mod_base = OTHER; note = 2'-O-methyluridine-3'-phosphate
  modified_base 20: mod_base = OTHER; note = 2'-O-methylguanosine-3'-phosphate
  modified_base 21: mod_base = OTHER; note = 2'-O-methylguanosine-3'- phosphorothioate
  modified_base 22: mod_base = OTHER; note = 2'-O-methyladenosine-3'- phosphorothioate
  modified_base 23: mod_base = OTHER; note = 2'-O-methyluridine-3'-phosphate
agcatcaggatatagctgtggat

SEQ ID NO: 3897 - RNA, 23 nt, synthetic construct
  source 1..23: mol_type = other RNA
  modified_base 1: mod_base = OTHER; note = 2'-O-methyluridine-3'-phosphorothioate
  modified_base 2: mod_base = OTHER; note = 2'-fluoroadenosine-3'-phosphorothioate
  modified_base 3: mod_base = OTHER; note = 2'-O-methylcytidine-3'-phosphate
  modified_base 4: mod_base = OTHER; note = 2'-O-methyluridine-3'-phosphate
  modified_base 5: mod_base = OTHER; note = 2'-O-methyladenosine-3'-phosphate
  modified_base 6: mod_base = OTHER; note = 2'-fluoroguanosine-3'-phosphate
  modified_base 7: mod_base = OTHER; note = 2'-O-methylguanosine-3'-phosphate
  modified_base 8: mod_base = OTHER; note = 2'-fluorocytidine-3'-phosphate
  modified_base 9: mod_base = OTHER; note = 2'-fluoroadenosine-3'-phosphate
  modified_base 10: mod_base = OTHER; note = 2'-O-methyluridine-3'-phosphate
  modified_base 11: mod_base = OTHER; note = 2'-O-methylguanosine-3'-phosphate
  modified_base 12: mod_base = OTHER; note = 2'-O-methyluridine-3'-phosphate
  modified_base 13: mod_base = OTHER; note = 2'-O-methyluridine-3'-phosphate
  modified_base 14: mod_base = OTHER; note = 2'-fluorocytidine-3'-phosphate
  modified_base 15: mod_base = OTHER; note = 2'-O-methyladenosine-3'-phosphate
  modified_base 16: mod_base = OTHER; note = 2'-fluoroguanosine-3'-phosphate
  modified_base 17: mod_base = OTHER; note = 2'-O-methyluridine-3'-phosphate
  modified_base 18: mod_base = OTHER; note = 2'-O-methylguanosine-3'-phosphate
  modified_base 19: mod_base = OTHER; note = 2'-O-methyladenosine-3'-phosphate
  modified_base 20: mod_base = OTHER; note = 2'-O-methyladenosine-3'-phosphate
  modified_base 21: mod_base = OTHER; note = 2'-O-methylguanosine-3'- phosphorothioate
  modified_base 22: mod_base = OTHER; note = 2'-O-methylguanosine-3'- phosphorothioate
  modified_base 23: mod_base = OTHER; note = 2'-O-methyladenosine-3'-phosphate
tactaggcatgttcagtgaagga

SEQ ID NO: 3898 - RNA, 23 nt, synthetic construct
  source 1..23: mol_type = other RNA
  modified_base 1: mod_base = OTHER; note = 2'-O-methyluridine-3'-phosphorothioate
  modified_base 2: mod_base = OTHER; note = 2'-fluorouridine -3'-phosphorothioate
  modified_base 3: mod_base = OTHER; note = 2'-O-methylcytidine-3'-phosphate
  modified_base 4: mod_base = OTHER; note = 2'-O-methyladenosine-3'-phosphate
  modified_base 5: mod_base = OTHER; note = 2'-O-methyluridine-3'-phosphate
  modified_base 6: mod_base = OTHER; note = 2'-fluoroadenosine-3'-phosphate
  modified_base 7: mod_base = OTHER; note = 2'-O-methyladenosine-3'-phosphate
  modified_base 8: mod_base = OTHER; note = 2'-fluoroguanosine-3'-phosphate
  modified_base 9: mod_base = OTHER; note = 2'-fluorocytidine-3'-phosphate
  modified_base 10: mod_base = OTHER; note = 2'-O-methyladenosine-3'-phosphate
  modified_base 11: mod_base = OTHER; note = 2'-O-methylcytidine-3'-phosphate
  modified_base 12: mod_base = OTHER; note = 2'-O-methyluridine-3'-phosphate
  modified_base 13: mod_base = OTHER; note = 2'-O-methylcytidine-3'-phosphate
  modified_base 14: mod_base = OTHER; note = 2'-fluorouridine-3'-phosphate
  modified_base 15: mod_base = OTHER; note = 2'-O-methylcytidine-3'-phosphate
  modified_base 16: mod_base = OTHER; note = 2'-fluoroadenosine-3'-phosphate
  modified_base 17: mod_base = OTHER; note = 2'-O-methyladenosine-3'-phosphate
  modified_base 18: mod_base = OTHER; note = 2'-O-methylcytidine-3'-phosphate
  modified_base 19: mod_base = OTHER; note = 2'-O-methylcytidine-3'-phosphate
  modified_base 20: mod_base = OTHER; note = 2'-O-methyladenosine-3'-phosphate
  modified_base 21: mod_base = OTHER; note = 2'-O-methylcytidine-3'- phosphorothioate
  modified_base 22: mod_base = OTHER; note = 2'-O-methylcytidine-3'- phosphorothioate
  modified_base 23: mod_base = OTHER; note = 2'-O-methyluridine-3'-phosphate
ttcataagcactctcaaccacct

SEQ ID NO: 3899 - RNA, 23 nt, synthetic construct
  source 1..23: mol_type = other RNA
  modified_base 1: mod_base = OTHER; note = 2'-O-methyluridine-3'-phosphorothioate
  modified_base 2: mod_base = OTHER; note = 2'-fluoroguanosine-3'-phosphorothioate
  modified_base 3: mod_base = OTHER; note = 2'-O-methyluridine-3'-phosphate
  modified_base 4: mod_base = OTHER; note = 2'-O-methyladenosine-3'-phosphate
  modified_base 5: mod_base = OTHER; note = 2'-O-methyladenosine-3'-phosphate
  modified_base 6: mod_base = OTHER; note = 2'-fluorouridine-3'-phosphate
  modified_base 7: mod_base = OTHER; note = 2'-O-methylguanosine-3'-phosphate
  modified_base 8: mod_base = OTHER; note = 2'-fluorouridine-3'-phosphate
  modified_base 9: mod_base = OTHER; note = 2'-fluoroadenosine-3'-phosphate
  modified_base 10: mod_base = OTHER; note = 2'-O-methylcytidine-3'-phosphate
  modified_base 11: mod_base = OTHER; note = 2'-O-methyladenosine-3'-phosphate
  modified_base 12: mod_base = OTHER; note = 2'-O-methylcytidine-3'-phosphate
  modified_base 13: mod_base = OTHER; note = 2'-O-methyluridine-3'-phosphate
  modified_base 14: mod_base = OTHER; note = 2'-fluoroadenosine-3'-phosphate
  modified_base 15: mod_base = OTHER; note = 2'-O-methylcytidine-3'-phosphate
  modified_base 16: mod_base = OTHER; note = 2'-fluorouridine-3'-phosphate
  modified_base 17: mod_base = OTHER; note = 2'-O-methylguanosine-3'-phosphate
  modified_base 18: mod_base = OTHER; note = 2'-O-methyladenosine-3'-phosphate
  modified_base 19: mod_base = OTHER; note = 2'-O-methyluridine-3'-phosphate
  modified_base 20: mod_base = OTHER; note = 2'-O-methyladenosine-3'-phosphate
  modified_base 21: mod_base = OTHER; note = 2'-O-methyluridine-3'-phosphorothioate
  modified_base 22: mod_base = OTHER; note = 2'-O-methyladenosine-3'- phosphorothioate
  modified_base 23: mod_base = OTHER; note = 2'-O-methylguanosine-3'-phosphate
tgtaatgtacactactgatatag

SEQ ID NO: 3900 - RNA, 23 nt, synthetic construct
  source 1..23: mol_type = other RNA
  modified_base 1: mod_base = OTHER; note = 2'-O-methyluridine-3'-phosphorothioate
  modified_base 2: mod_base = OTHER; note = 2'-fluoroadenosine-3'-phosphorothioate
  modified_base 3: mod_base = OTHER; note = 2'-O-methyladenosine-3'-phosphate
  modified_base 4: mod_base = OTHER; note = 2'-O-methylcytidine-3'-phosphate
  modified_base 5: mod_base = OTHER; note = 2'-O-methyladenosine-3'-phosphate
  modified_base 6: mod_base = OTHER; note = 2'-fluorocytidine-3'-phosphate
  modified_base 7: mod_base = OTHER; note = 2'-O-methyluridine-3'-phosphate
  modified_base 8: mod_base = OTHER; note = 2'-fluorouridine-3'-phosphate
  modified_base 9: mod_base = OTHER; note = 2'-fluoroguanosine-3'-phosphate
  modified_base 10: mod_base = OTHER; note = 2'-O-methylguanosine-3'-phosphate
  modified_base 11: mod_base = OTHER; note = 2'-O-methyladenosine-3'-phosphate
  modified_base 12: mod_base = OTHER; note = 2'-O-methyluridine-3'-phosphate
  modified_base 13: mod_base = OTHER; note = 2'-O-methyladenosine-3'-phosphate
  modified_base 14: mod_base = OTHER; note = 2'-fluoroguanosine-3'-phosphate
  modified_base 15: mod_base = OTHER; note = 2'-O-methyluridine-3'-phosphate
  modified_base 16: mod_base = OTHER; note = 2'-fluorouridine-3'-phosphate
  modified_base 17: mod_base = OTHER; note = 2'-O-methylguanosine-3'-phosphate
  modified_base 18: mod_base = OTHER; note = 2'-O-methylguanosine-3'-phosphate
  modified_base 19: mod_base = OTHER; note = 2'-O-methyluridine-3'-phosphate
  modified_base 20: mod_base = OTHER; note = 2'-O-methyluridine-3'-phosphate
  modified_base 21: mod_base = OTHER; note = 2'-O-methylguanosine-3'- phosphorothioate
  modified_base 22: mod_base = OTHER; note = 2'-O-methylcytidine-3'- phosphorothioate
  modified_base 23: mod_base = OTHER; note = 2'-O-methyladenosine-3'-phosphate
taacacttggatagttggttgca

SEQ ID NO: 3901 - RNA, 23 nt, synthetic construct
  source 1..23: mol_type = other RNA
  modified_base 1: mod_base = OTHER; note = 2'-O-methyluridine-3'-phosphorothioate
  modified_base 2: mod_base = OTHER; note = 2'-fluoroadenosine-3'-phosphorothioate
  modified_base 3: mod_base = OTHER; note = 2'-O-methyluridine-3'-phosphate
  modified_base 4: mod_base = OTHER; note = 2'-O-methyladenosine-3'-phosphate
  modified_base 5: mod_base = OTHER; note = 2'-O-methylcytidine-3'-phosphate
  modified_base 6: mod_base = OTHER; note = 2'-fluorouridine-3'-phosphate
  modified_base 7: mod_base = OTHER; note = 2'-O-methylcytidine-3'-phosphate
  modified_base 8: mod_base = OTHER; note = 2'-fluorouridine-3'-phosphate
  modified_base 9: mod_base = OTHER; note = 2'-fluorocytidine-3'-phosphate
  modified_base 10: mod_base = OTHER; note = 2'-O-methyluridine-3'-phosphate
  modified_base 11: mod_base = OTHER; note = 2'-O-methylguanosine-3'-phosphate
  modified_base 12: mod_base = OTHER; note = 2'-O-methylcytidine-3'-phosphate
  modified_base 13: mod_base = OTHER; note = 2'-O-methylcytidine-3'-phosphate
  modified_base 14: mod_base = OTHER; note = 2'-fluoroadenosine-3'-phosphate
  modified_base 15: mod_base = OTHER; note = 2'-O-methyladenosine-3'-phosphate
  modified_base 16: mod_base = OTHER; note = 2'-fluoroadenosine-3'-phosphate
  modified_base 17: mod_base = OTHER; note = 2'-O-methyluridine-3'-phosphate
  modified_base 18: mod_base = OTHER; note = 2'-O-methylcytidine-3'-phosphate
  modified_base 19: mod_base = OTHER; note = 2'-O-methyluridine-3'-phosphate
  modified_base 20: mod_base = OTHER; note = 2'-O-methylguanosine-3'-phosphate
  modified_base 21: mod_base = OTHER; note = 2'-O-methylcytidine-3'- phosphorothioate
  modified_base 22: mod_base = OTHER; note = 2'-O-methyluridine-3'-phosphorothioate
  modified_base 23: mod_base = OTHER; note = 2'-O-methyladenosine-3'-phosphate
tatactctctgccaaatctgcta

SEQ ID NO: 3902 - RNA, 23 nt, synthetic construct
  source 1..23: mol_type = other RNA
  modified_base 1: mod_base = OTHER; note = 2'-O-methyluridine-3'-phosphorothioate
  modified_base 2: mod_base = OTHER; note = 2'-fluoroadenosine-3'-phosphorothioate
  modified_base 3: mod_base = OTHER; note = 2'-O-methylguanosine-3'-phosphate
  modified_base 4: mod_base = OTHER; note = 2'-O-methylguanosine-3'-phosphate
  modified_base 5: mod_base = OTHER; note = 2'-O-methylcytidine-3'-phosphate
  modified_base 6: mod_base = OTHER; note = 2'-fluoroadenosine-3'-phosphate
  modified_base 7: mod_base = OTHER; note = 2'-O-methyluridine-3'-phosphate
  modified_base 8: mod_base = OTHER; note = 2'-fluoroguanosine-3'-phosphate
  modified_base 9: mod_base = OTHER; note = 2'-fluorouridine-3'-phosphate
  modified_base 10: mod_base = OTHER; note = 2'-O-methyluridine-3'-phosphate
  modified_base 11: mod_base = OTHER; note = 2'-O-methylcytidine-3'-phosphate
  modified_base 12: mod_base = OTHER; note = 2'-O-methyladenosine-3'-phosphate
  modified_base 13: mod_base = OTHER; note = 2'-O-methylguanosine-3'-phosphate
  modified_base 14: mod_base = OTHER; note = 2'-fluorouridine-3'-phosphate
  modified_base 15: mod_base = OTHER; note = 2'-O-methylguanosine-3'-phosphate
  modified_base 16: mod_base = OTHER; note = 2'-fluoroadenosine-3'-phosphate
  modified_base 17: mod_base = OTHER; note = 2'-O-methyladenosine-3'-phosphate
  modified_base 18: mod_base = OTHER; note = 2'-O-methylguanosine-3'-phosphate
  modified_base 19: mod_base = OTHER; note = 2'-O-methylguanosine-3'-phosphate
  modified_base 20: mod_base = OTHER; note = 2'-O-methyladenosine-3'-phosphate
  modified_base 21: mod_base = OTHER; note = 2'-O-methylguanosine-3'- phosphorothioate
  modified_base 22: mod_base = OTHER; note = 2'-O-methylcytidine-3'- phosphorothioate
  modified_base 23: mod_base = OTHER; note = 2'-O-methylcytidine-3'-phosphate
taggcatgttcagtgaaggagcc

SEQ ID NO: 3903 - RNA, 23 nt, synthetic construct
  source 1..23: mol_type = other RNA
  modified_base 1: mod_base = OTHER; note = 2'-O-methyladenosine-3'- phosphorothioate
  modified_base 2: mod_base = OTHER; note = 2'-fluoroadenosine-3'-phosphorothioate
  modified_base 3: mod_base = OTHER; note = 2'-O-methyladenosine-3'-phosphate
  modified_base 4: mod_base = OTHER; note = 2'-O-methyladenosine-3'-phosphate
  modified_base 5: mod_base = OTHER; note = 2'-O-methyladenosine-3'-phosphate
  modified_base 6: mod_base = OTHER; note = 2'-fluorouridine-3'-phosphate
  modified_base 7: mod_base = OTHER; note = 2'-O-methylguanosine-3'-phosphate
  modified_base 8: mod_base = OTHER; note = 2'-fluorouridine-3'-phosphate
  modified_base 9: mod_base = OTHER; note = 2'-fluorouridine-3'-phosphate
  modified_base 10: mod_base = OTHER; note = 2'-O-methylguanosine-3'-phosphate
  modified_base 11: mod_base = OTHER; note = 2'-O-methylguanosine-3'-phosphate
  modified_base 12: mod_base = OTHER; note = 2'-O-methyladenosine-3'-phosphate
  modified_base 13: mod_base = OTHER; note = 2'-O-methylcytidine-3'-phosphate
  modified_base 14: mod_base = OTHER; note = 2'-fluorouridine-3'-phosphate
  modified_base 15: mod_base = OTHER; note = 2'-O-methyladenosine-3'-phosphate
  modified_base 16: mod_base = OTHER; note = 2'-fluoroguanosine-3'-phosphate
  modified_base 17: mod_base = OTHER; note = 2'-O-methylguanosine-3'-phosphate
  modified_base 18: mod_base = OTHER; note = 2'-O-methylcytidine-3'-phosphate
  modified_base 19: mod_base = OTHER; note = 2'-O-methyladenosine-3'-phosphate
  modified_base 20: mod_base = OTHER; note = 2'-O-methyluridine-3'-phosphate
  modified_base 21: mod_base = OTHER; note = 2'-O-methylguanosine-3'- phosphorothioate
  modified_base 22: mod_base = OTHER; note = 2'-O-methyluridine-3'-phosphorothioate
  modified_base 23: mod_base = OTHER; note = 2'-O-methyluridine-3'-phosphate
aaaaatgttggactaggcatgtt

SEQ ID NO: 3904 - RNA, 23 nt, synthetic construct
  source 1..23: mol_type = other RNA
  modified_base 1: mod_base = OTHER; note = 2'-O-methyluridine-3'-phosphorothioate
  modified_base 2: mod_base = OTHER; note = 2'-fluorouridine -3'-phosphorothioate
  modified_base 3: mod_base = OTHER; note = 2'-O-methylcytidine-3'-phosphate
  modified_base 4: mod_base = OTHER; note = 2'-O-methyladenosine-3'-phosphate
  modified_base 5: mod_base = OTHER; note = 2'-O-methyluridine-3'-phosphate
  modified_base 6: mod_base = OTHER; note = 2'-fluorouridine-3'-phosphate
  modified_base 7: mod_base = OTHER; note = 2'-O-methyladenosine-3'-phosphate
  modified_base 8: mod_base = OTHER; note = 2'-fluoroadenosine-3'-phosphate
  modified_base 9: mod_base = OTHER; note = 2'-fluoroguanosine-3'-phosphate
  modified_base 10: mod_base = OTHER; note = 2'-O-methyladenosine-3'-phosphate
  modified_base 11: mod_base = OTHER; note = 2'-O-methyluridine-3'-phosphate
  modified_base 12: mod_base = OTHER; note = 2'-O-methyladenosine-3'-phosphate
  modified_base 13: mod_base = OTHER; note = 2'-O-methylcytidine-3'-phosphate
  modified_base 14: mod_base = OTHER; note = 2'-fluorouridine-3'-phosphate
  modified_base 15: mod_base = OTHER; note = 2'-O-methylguanosine-3'-phosphate
  modified_base 16: mod_base = OTHER; note = 2'-fluoroadenosine-3'-phosphate
  modified_base 17: mod_base = OTHER; note = 2'-O-methyluridine-3'-phosphate
  modified_base 18: mod_base = OTHER; note = 2'-O-methylguanosine-3'-phosphate
  modified_base 19: mod_base = OTHER; note = 2'-O-methylguanosine-3'-phosphate
  modified_base 20: mod_base = OTHER; note = 2'-O-methylcytidine-3'-phosphate
  modified_base 21: mod_base = OTHER; note = 2'-O-methyladenosine-3'- phosphorothioate
  modified_base 22: mod_base = OTHER; note = 2'-O-methylcytidine-3'- phosphorothioate
  modified_base 23: mod_base = OTHER; note = 2'-O-methyladenosine-3'-phosphate
ttcattaagatactgatggcaca

SEQ ID NO: 3905 - RNA, 23 nt, synthetic construct
  source 1..23: mol_type = other RNA
  modified_base 1: mod_base = OTHER; note = 2'-O-methyluridine-3'-phosphorothioate
  modified_base 2: mod_base = OTHER; note = 2'-fluorouridine -3'-phosphorothioate
  modified_base 3: mod_base = OTHER; note = 2'-O-methyluridine-3'-phosphate
  modified_base 4: mod_base = OTHER; note = 2'-O-methylcytidine-3'-phosphate
  modified_base 5: mod_base = OTHER; note = 2'-O-methyladenosine-3'-phosphate
  modified_base 6: mod_base = OTHER; note = 2'-fluorouridine-3'-phosphate
  modified_base 7: mod_base = OTHER; note = 2'-O-methyluridine-3'-phosphate
  modified_base 8: mod_base = OTHER; note = 2'-fluoroadenosine-3'-phosphate
  modified_base 9: mod_base = OTHER; note = 2'-fluoroadenosine-3'-phosphate
  modified_base 10: mod_base = OTHER; note = 2'-O-methylguanosine-3'-phosphate
  modified_base 11: mod_base = OTHER; note = 2'-O-methyladenosine-3'-phosphate
  modified_base 12: mod_base = OTHER; note = 2'-O-methyluridine-3'-phosphate
  modified_base 13: mod_base = OTHER; note = 2'-O-methyladenosine-3'-phosphate
  modified_base 14: mod_base = OTHER; note = 2'-fluorocytidine-3'-phosphate
  modified_base 15: mod_base = OTHER; note = 2'-O-methyluridine-3'-phosphate
  modified_base 16: mod_base = OTHER; note = 2'-fluoroguanosine-3'-phosphate
  modified_base 17: mod_base = OTHER; note = 2'-O-methyladenosine-3'-phosphate
  modified_base 18: mod_base = OTHER; note = 2'-O-methyluridine-3'-phosphate
  modified_base 19: mod_base = OTHER; note = 2'-O-methylguanosine-3'-phosphate
  modified_base 20: mod_base = OTHER; note = 2'-O-methylguanosine-3'-phosphate
  modified_base 21: mod_base = OTHER; note = 2'-O-methylcytidine-3'- phosphorothioate
  modified_base 22: mod_base = OTHER; note = 2'-O-methyladenosine-3'- phosphorothioate
  modified_base 23: mod_base = OTHER; note = 2'-O-methylcytidine-3'-phosphate
tttcattaagatactgatggcac

SEQ ID NO: 3906 - RNA, 23 nt, synthetic construct
  source 1..23: mol_type = other RNA
  modified_base 1: mod_base = OTHER; note = 2'-O-methyladenosine-3'- phosphorothioate
  modified_base 2: mod_base = OTHER; note = 2'-fluoroguanosine-3'-phosphorothioate
  modified_base 3: mod_base = OTHER; note = 2'-O-methyladenosine-3'-phosphate
  modified_base 4: mod_base = OTHER; note = 2'-O-methylcytidine-3'-phosphate
  modified_base 5: mod_base = OTHER; note = 2'-O-methyladenosine-3'-phosphate
  modified_base 6: mod_base = OTHER; note = 2'-fluoroadenosine-3'-phosphate
  modified_base 7: mod_base = OTHER; note = 2'-O-methyluridine-3'-phosphate
  modified_base 8: mod_base = OTHER; note = 2'-fluorocytidine-3'-phosphate
  modified_base 9: mod_base = OTHER; note = 2'-fluorouridine-3'-phosphate
  modified_base 10: mod_base = OTHER; note = 2'-O-methyluridine-3'-phosphate
  modified_base 11: mod_base = OTHER; note = 2'-O-methyluridine-3'-phosphate
  modified_base 12: mod_base = OTHER; note = 2'-O-methylguanosine-3'-phosphate
  modified_base 13: mod_base = OTHER; note = 2'-O-methylguanosine-3'-phosphate
  modified_base 14: mod_base = OTHER; note = 2'-fluorouridine-3'-phosphate
  modified_base 15: mod_base = OTHER; note = 2'-O-methylguanosine-3'-phosphate
  modified_base 16: mod_base = OTHER; note = 2'-fluorouridine-3'-phosphate
  modified_base 17: mod_base = OTHER; note = 2'-O-methyluridine-3'-phosphate
  modified_base 18: mod_base = OTHER; note = 2'-O-methylcytidine-3'-phosphate
  modified_base 19: mod_base = OTHER; note = 2'-O-methyluridine-3'-phosphate
  modified_base 20: mod_base = OTHER; note = 2'-O-methyladenosine-3'-phosphate
  modified_base 21: mod_base = OTHER; note = 2'-O-methyladenosine-3'- phosphorothioate
  modified_base 22: mod_base = OTHER; note = 2'-O-methylguanosine-3'- phosphorothioate
  modified_base 23: mod_base = OTHER; note = 2'-O-methylguanosine-3'-phosphate
agacaatctttggtgttctaagg

SEQ ID NO: 3907 - RNA, 23 nt, synthetic construct
  source 1..23: mol_type = other RNA
  modified_base 1: mod_base = OTHER; note = 2'-O-methyluridine-3'-phosphorothioate
  modified_base 2: mod_base = OTHER; note = 2'-fluoroadenosine-3'-phosphorothioate
  modified_base 3: mod_base = OTHER; note = 2'-O-methylguanosine-3'-phosphate
  modified_base 4: mod_base = OTHER; note = 2'-O-methylcytidine-3'-phosphate
  modified_base 5: mod_base = OTHER; note = 2'-O-methylcytidine-3'-phosphate
  modified_base 6: mod_base = OTHER; note = 2'-fluorouridine-3'-phosphate
  modified_base 7: mod_base = OTHER; note = 2'-O-methyladenosine-3'-phosphate
  modified_base 8: mod_base = OTHER; note = 2'-fluoroguanosine-3'-phosphate
  modified_base 9: mod_base = OTHER; note = 2'-fluoroadenosine-3'-phosphate
  modified_base 10: mod_base = OTHER; note = 2'-O-methylcytidine-3'-phosphate
  modified_base 11: mod_base = OTHER; note = 2'-O-methyladenosine-3'-phosphate
  modified_base 12: mod_base = OTHER; note = 2'-O-methylguanosine-3'-phosphate
  modified_base 13: mod_base = OTHER; note = 2'-O-methyluridine-3'-phosphate
  modified_base 14: mod_base = OTHER; note = 2'-fluoroguanosine-3'-phosphate
  modified_base 15: mod_base = OTHER; note = 2'-O-methyladenosine-3'-phosphate
  modified_base 16: mod_base = OTHER; note = 2'-fluoroadenosine-3'-phosphate
  modified_base 17: mod_base = OTHER; note = 2'-O-methyladenosine-3'-phosphate
  modified_base 18: mod_base = OTHER; note = 2'-O-methyluridine-3'-phosphate
  modified_base 19: mod_base = OTHER; note = 2'-O-methylguanosine-3'-phosphate
  modified_base 20: mod_base = OTHER; note = 2'-O-methyladenosine-3'-phosphate
  modified_base 21: mod_base = OTHER; note = 2'-O-methyluridine-3'-phosphorothioate
  modified_base 22: mod_base = OTHER; note = 2'-O-methyladenosine-3'- phosphorothioate
  modified_base 23: mod_base = OTHER; note = 2'-O-methyluridine-3'-phosphate
tagcctagacagtgaaatgatat

SEQ ID NO: 3908 - RNA, 23 nt, synthetic construct
  source 1..23: mol_type = other RNA
  modified_base 1: mod_base = OTHER; note = 2'-O-methyluridine-3'-phosphorothioate
  modified_base 2: mod_base = OTHER; note = 2'-fluorouridine -3'-phosphorothioate
  modified_base 3: mod_base = OTHER; note = 2'-O-methylguanosine-3'-phosphate
  modified_base 4: mod_base = OTHER; note = 2'-O-methyluridine-3'-phosphate
  modified_base 5: mod_base = OTHER; note = 2'-O-methyluridine-3'-phosphate
  modified_base 6: mod_base = OTHER; note = 2'-fluoroguanosine-3'-phosphate
  modified_base 7: mod_base = OTHER; note = 2'-O-methyluridine-3'-phosphate
  modified_base 8: mod_base = OTHER; note = 2'-fluoroadenosine-3'-phosphate
  modified_base 9: mod_base = OTHER; note = 2'-fluoroguanosine-3'-phosphate
  modified_base 10: mod_base = OTHER; note = 2'-O-methylcytidine-3'-phosphate
  modified_base 11: mod_base = OTHER; note = 2'-O-methylcytidine-3'-phosphate
  modified_base 12: mod_base = OTHER; note = 2'-O-methyluridine-3'-phosphate
  modified_base 13: mod_base = OTHER; note = 2'-O-methyladenosine-3'-phosphate
  modified_base 14: mod_base = OTHER; note = 2'-fluoroguanosine-3'-phosphate
  modified_base 15: mod_base = OTHER; note = 2'-O-methyladenosine-3'-phosphate
  modified_base 16: mod_base = OTHER; note = 2'-fluorocytidine-3'-phosphate
  modified_base 17: mod_base = OTHER; note = 2'-O-methyladenosine-3'-phosphate
  modified_base 18: mod_base = OTHER; note = 2'-O-methylguanosine-3'-phosphate
  modified_base 19: mod_base = OTHER; note = 2'-O-methyluridine-3'-phosphate
  modified_base 20: mod_base = OTHER; note = 2'-O-methylguanosine-3'-phosphate
  modified_base 21: mod_base = OTHER; note = 2'-O-methyladenosine-3'- phosphorothioate
  modified_base 22: mod_base = OTHER; note = 2'-O-methyladenosine-3'- phosphorothioate
  modified_base 23: mod_base = OTHER; note = 2'-O-methyladenosine-3'-phosphate
ttgttgtagcctagacagtgaaa

SEQ ID NO: 3909 - RNA, 23 nt, synthetic construct
  source 1..23: mol_type = other RNA
  modified_base 1: mod_base = OTHER; note = 2'-O-methyluridine-3'-phosphorothioate
  modified_base 2: mod_base = OTHER; note = 2'-fluoroguanosine-3'-phosphorothioate
  modified_base 3: mod_base = OTHER; note = 2'-O-methyluridine-3'-phosphate
  modified_base 4: mod_base = OTHER; note = 2'-O-methyladenosine-3'-phosphate
  modified_base 5: mod_base = OTHER; note = 2'-O-methyluridine-3'-phosphate
  modified_base 6: mod_base = OTHER; note = 2'-fluoroadenosine-3'-phosphate
  modified_base 7: mod_base = OTHER; note = 2'-O-methyladenosine-3'-phosphate
  modified_base 8: mod_base = OTHER; note = 2'-fluorocytidine-3'-phosphate
  modified_base 9: mod_base = OTHER; note = 2'-fluoroadenosine-3'-phosphate
  modified_base 10: mod_base = OTHER; note = 2'-O-methylcytidine-3'-phosphate
  modified_base 11: mod_base = OTHER; note = 2'-O-methyluridine-3'-phosphate
  modified_base 12: mod_base = OTHER; note = 2'-O-methyluridine-3'-phosphate
  modified_base 13: mod_base = OTHER; note = 2'-O-methylguanosine-3'-phosphate
  modified_base 14: mod_base = OTHER; note = 2'-fluoroguanosine-3'-phosphate
  modified_base 15: mod_base = OTHER; note = 2'-O-methyladenosine-3'-phosphate
  modified_base 16: mod_base = OTHER; note = 2'-fluorouridine-3'-phosphate
  modified_base 17: mod_base = OTHER; note = 2'-O-methyladenosine-3'-phosphate
  modified_base 18: mod_base = OTHER; note = 2'-O-methylguanosine-3'-phosphate
  modified_base 19: mod_base = OTHER; note = 2'-O-methyluridine-3'-phosphate
  modified_base 20: mod_base = OTHER; note = 2'-O-methyluridine-3'-phosphate
  modified_base 21: mod_base = OTHER; note = 2'-O-methylguanosine-3'- phosphorothioate
  modified_base 22: mod_base = OTHER; note = 2'-O-methylguanosine-3'- phosphorothioate
  modified_base 23: mod_base = OTHER; note = 2'-O-methyluridine-3'-phosphate
tgtataacacttggatagttggt

SEQ ID NO: 3910 - RNA, 23 nt, synthetic construct
  source 1..23: mol_type = other RNA
  modified_base 1: mod_base = OTHER; note = 2'-O-methyluridine-3'-phosphorothioate
  modified_base 2: mod_base = OTHER; note = 2'-fluorocytidine-3'-phosphorothioate
  modified_base 3: mod_base = OTHER; note = 2'-O-methyladenosine-3'-phosphate
  modified_base 4: mod_base = OTHER; note = 2'-O-methyluridine-3'-phosphate
  modified_base 5: mod_base = OTHER; note = 2'-O-methyladenosine-3'-phosphate
  modified_base 6: mod_base = OTHER; note = 2'-fluorouridine-3'-phosphate
  modified_base 7: mod_base = OTHER; note = 2'-O-methyluridine-3'-phosphate
  modified_base 8: mod_base = OTHER; note = 2'-fluoroguanosine-3'-phosphate
  modified_base 9: mod_base = OTHER; note = 2'-fluoroguanosine-3'-phosphate
  modified_base 10: mod_base = OTHER; note = 2'-O-methyladenosine-3'-phosphate
  modified_base 11: mod_base = OTHER; note = 2'-O-methylcytidine-3'-phosphate
  modified_base 12: mod_base = OTHER; note = 2'-O-methyluridine-3'-phosphate
  modified_base 13: mod_base = OTHER; note = 2'-O-methyluridine-3'-phosphate
  modified_base 14: mod_base = OTHER; note = 2'-fluoroguanosine-3'-phosphate
  modified_base 15: mod_base = OTHER; note = 2'-O-methylguanosine-3'-phosphate
  modified_base 16: mod_base = OTHER; note = 2'-fluoroadenosine-3'-phosphate
  modified_base 17: mod_base = OTHER; note = 2'-O-methyladenosine-3'-phosphate
  modified_base 18: mod_base = OTHER; note = 2'-O-methylcytidine-3'-phosphate
  modified_base 19: mod_base = OTHER; note = 2'-O-methylcytidine-3'-phosphate
  modified_base 20: mod_base = OTHER; note = 2'-O-methyladenosine-3'-phosphate
  modified_base 21: mod_base = OTHER; note = 2'-O-methyladenosine-3'- phosphorothioate
  modified_base 22: mod_base = OTHER; note = 2'-O-methyladenosine-3'- phosphorothioate
  modified_base 23: mod_base = OTHER; note = 2'-O-methyladenosine-3'-phosphate
tcatattggacttggaaccaaaa

SEQ ID NO: 3911 - RNA, 23 nt, synthetic construct
  source 1..23: mol_type = other RNA
  modified_base 1: mod_base = OTHER; note = 2'-O-methyladenosine-3'- phosphorothioate
  modified_base 2: mod_base = OTHER; note = 2'-fluoroguanosine-3'-phosphorothioate
  modified_base 3: mod_base = OTHER; note = 2'-O-methyluridine-3'-phosphate
  modified_base 4: mod_base = OTHER; note = 2'-O-methyluridine-3'-phosphate
  modified_base 5: mod_base = OTHER; note = 2'-O-methyluridine-3'-phosphate
  modified_base 6: mod_base = OTHER; note = 2'-fluoroguanosine-3'-phosphate
  modified_base 7: mod_base = OTHER; note = 2'-O-methyladenosine-3'-phosphate
  modified_base 8: mod_base = OTHER; note = 2'-fluorouridine-3'-phosphate
  modified_base 9: mod_base = OTHER; note = 2'-fluorocytidine-3'-phosphate
  modified_base 10: mod_base = OTHER; note = 2'-O-methyladenosine-3'-phosphate
  modified_base 11: mod_base = OTHER; note = 2'-O-methylcytidine-3'-phosphate
  modified_base 12: mod_base = OTHER; note = 2'-O-methylcytidine-3'-phosphate
  modified_base 13: mod_base = OTHER; note = 2'-O-methyluridine-3'-phosphate
  modified_base 14: mod_base = OTHER; note = 2'-fluorocytidine-3'-phosphate
  modified_base 15: mod_base = OTHER; note = 2'-O-methyladenosine-3'-phosphate
  modified_base 16: mod_base = OTHER; note = 2'-fluorouridine-3'-phosphate
  modified_base 17: mod_base = OTHER; note = 2'-O-methyladenosine-3'-phosphate
  modified_base 18: mod_base = OTHER; note = 2'-O-methyladenosine-3'-phosphate
  modified_base 19: mod_base = OTHER; note = 2'-O-methylguanosine-3'-phosphate
  modified_base 20: mod_base = OTHER; note = 2'-O-methylcytidine-3'-phosphate
  modified_base 21: mod_base = OTHER; note = 2'-O-methyladenosine-3'- phosphorothioate
  modified_base 22: mod_base = OTHER; note = 2'-O-methylcytidine-3'- phosphorothioate
  modified_base 23: mod_base = OTHER; note = 2'-O-methyluridine-3'-phosphate
agtttgatcacctcataagcact

SEQ ID NO: 3912 - RNA, 23 nt, synthetic construct
  source 1..23: mol_type = other RNA
  modified_base 1: mod_base = OTHER; note = 2'-O-methyluridine-3'-phosphorothioate
  modified_base 2: mod_base = OTHER; note = 2'-fluorocytidine-3'-phosphorothioate
  modified_base 3: mod_base = OTHER; note = 2'-O-methyladenosine-3'-phosphate
  modified_base 4: mod_base = OTHER; note = 2'-O-methylcytidine-3'-phosphate
  modified_base 5: mod_base = OTHER; note = 2'-O-methylcytidine-3'-phosphate
  modified_base 6: mod_base = OTHER; note = 2'-fluorouridine-3'-phosphate
  modified_base 7: mod_base = OTHER; note = 2'-O-methyluridine-3'-phosphate
  modified_base 8: mod_base = OTHER; note = 2'-fluorocytidine-3'-phosphate
  modified_base 9: mod_base = OTHER; note = 2'-fluoroadenosine-3'-phosphate
  modified_base 10: mod_base = OTHER; note = 2'-O-methylcytidine-3'-phosphate
  modified_base 11: mod_base = OTHER; note = 2'-O-methyladenosine-3'-phosphate
  modified_base 12: mod_base = OTHER; note = 2'-O-methyladenosine-3'-phosphate
  modified_base 13: mod_base = OTHER; note = 2'-O-methylguanosine-3'-phosphate
  modified_base 14: mod_base = OTHER; note = 2'-fluoroguanosine-3'-phosphate
  modified_base 15: mod_base = OTHER; note = 2'-O-methyluridine-3'-phosphate
  modified_base 16: mod_base = OTHER; note = 2'-fluorocytidine-3'-phosphate
  modified_base 17: mod_base = OTHER; note = 2'-O-methyluridine-3'-phosphate
  modified_base 18: mod_base = OTHER; note = 2'-O-methylguanosine-3'-phosphate
  modified_base 19: mod_base = OTHER; note = 2'-O-methyladenosine-3'-phosphate
  modified_base 20: mod_base = OTHER; note = 2'-O-methylguanosine-3'-phosphate
  modified_base 21: mod_base = OTHER; note = 2'-O-methyladenosine-3'- phosphorothioate
  modified_base 22: mod_base = OTHER; note = 2'-O-methyluridine-3'-phosphorothioate
  modified_base 23: mod_base = OTHER; note = 2'-O-methyluridine-3'-phosphate
tcaccttcacaaggtctgagatt

SEQ ID NO: 3913 - RNA, 23 nt, synthetic construct
  source 1..23: mol_type = other RNA
  modified_base 1: mod_base = OTHER; note = 2'-O-methyladenosine-3'- phosphorothioate
  modified_base 2: mod_base = OTHER; note = 2'-fluoroguanosine-3'-phosphorothioate
  modified_base 3: mod_base = OTHER; note = 2'-O-methylguanosine-3'-phosphate
  modified_base 4: mod_base = OTHER; note = 2'-O-methyladenosine-3'-phosphate
  modified_base 5: mod_base = OTHER; note = 2'-O-methyluridine-3'-phosphate
  modified_base 6: mod_base = OTHER; note = 2'-fluoroadenosine-3'-phosphate
  modified_base 7: mod_base = OTHER; note = 2'-O-methyluridine-3'-phosphate
  modified_base 8: mod_base = OTHER; note = 2'-fluoroadenosine-3'-phosphate
  modified_base 9: mod_base = OTHER; note = 2'-fluoroguanosine-3'-phosphate
  modified_base 10: mod_base = OTHER; note = 2'-O-methylcytidine-3'-phosphate
  modified_base 11: mod_base = OTHER; note = 2'-O-methyluridine-3'-phosphate
  modified_base 12: mod_base = OTHER; note = 2'-O-methylguanosine-3'-phosphate
  modified_base 13: mod_base = OTHER; note = 2'-O-methyluridine-3'-phosphate
  modified_base 14: mod_base = OTHER; note = 2'-fluoroguanosine-3'-phosphate
  modified_base 15: mod_base = OTHER; note = 2'-O-methylguanosine-3'-phosphate
  modified_base 16: mod_base = OTHER; note = 2'-fluoroadenosine-3'-phosphate
  modified_base 17: mod_base = OTHER; note = 2'-O-methyluridine-3'-phosphate
  modified_base 18: mod_base = OTHER; note = 2'-O-methyluridine-3'-phosphate
  modified_base 19: mod_base = OTHER; note = 2'-O-methyluridine-3'-phosphate
  modified_base 20: mod_base = OTHER; note = 2'-O-methyluridine-3'-phosphate
  modified_base 21: mod_base = OTHER; note = 2'-O-methyladenosine-3'- phosphorothioate
  modified_base 22: mod_base = OTHER; note = 2'-O-methylcytidine-3'- phosphorothioate
  modified_base 23: mod_base = OTHER; note = 2'-O-methyladenosine-3'-phosphate
aggatatagctgtggattttaca

SEQ ID NO: 3914 - RNA, 23 nt, synthetic construct
  source 1..23: mol_type = other RNA
  modified_base 1: mod_base = OTHER; note = 2'-O-methyladenosine-3'- phosphorothioate
  modified_base 2: mod_base = OTHER; note = 2'-fluorocytidine-3'-phosphorothioate
  modified_base 3: mod_base = OTHER; note = 2'-O-methyluridine-3'-phosphate
  modified_base 4: mod_base = OTHER; note = 2'-O-methyladenosine-3'-phosphate
  modified_base 5: mod_base = OTHER; note = 2'-O-methylguanosine-3'-phosphate
  modified_base 6: mod_base = OTHER; note = 2'-fluoroguanosine-3'-phosphate
  modified_base 7: mod_base = OTHER; note = 2'-O-methylcytidine-3'-phosphate
  modified_base 8: mod_base = OTHER; note = 2'-fluoroadenosine-3'-phosphate
  modified_base 9: mod_base = OTHER; note = 2'-fluorouridine-3'-phosphate
  modified_base 10: mod_base = OTHER; note = 2'-O-methylguanosine-3'-phosphate
  modified_base 11: mod_base = OTHER; note = 2'-O-methyluridine-3'-phosphate
  modified_base 12: mod_base = OTHER; note = 2'-O-methyluridine-3'-phosphate
  modified_base 13: mod_base = OTHER; note = 2'-O-methylcytidine-3'-phosphate
  modified_base 14: mod_base = OTHER; note = 2'-fluoroadenosine-3'-phosphate
  modified_base 15: mod_base = OTHER; note = 2'-O-methylguanosine-3'-phosphate
  modified_base 16: mod_base = OTHER; note = 2'-fluorouridine-3'-phosphate
  modified_base 17: mod_base = OTHER; note = 2'-O-methylguanosine-3'-phosphate
  modified_base 18: mod_base = OTHER; note = 2'-O-methyladenosine-3'-phosphate
  modified_base 19: mod_base = OTHER; note = 2'-O-methyladenosine-3'-phosphate
  modified_base 20: mod_base = OTHER; note = 2'-O-methylguanosine-3'-phosphate
  modified_base 21: mod_base = OTHER; note = 2'-O-methylguanosine-3'- phosphorothioate
  modified_base 22: mod_base = OTHER; note = 2'-O-methyladenosine-3'- phosphorothioate
  modified_base 23: mod_base = OTHER; note = 2'-O-methylguanosine-3'-phosphate
actaggcatgttcagtgaaggag

SEQ ID NO: 3915 - RNA, 23 nt, synthetic construct
  source 1..23: mol_type = other RNA
  modified_base 1: mod_base = OTHER; note = 2'-O-methyluridine-3'-phosphorothioate
  modified_base 2: mod_base = OTHER; note = 2'-fluoroguanosine-3'-phosphorothioate
  modified_base 3: mod_base = OTHER; note = 2'-O-methylguanosine-3'-phosphate
  modified_base 4: mod_base = OTHER; note = 2'-O-methyladenosine-3'-phosphate
  modified_base 5: mod_base = OTHER; note = 2'-O-methyluridine-3'-phosphate
  modified_base 6: mod_base = OTHER; note = 2'-fluorouridine-3'-phosphate
  modified_base 7: mod_base = OTHER; note = 2'-O-methyluridine-3'-phosphate
  modified_base 8: mod_base = OTHER; note = 2'-fluoroadenosine-3'-phosphate
  modified_base 9: mod_base = OTHER; note = 2'-fluorouridine-3'-phosphate
  modified_base 10: mod_base = OTHER; note = 2'-O-methyladenosine-3'-phosphate
  modified_base 11: mod_base = OTHER; note = 2'-O-methylcytidine-3'-phosphate
  modified_base 12: mod_base = OTHER; note = 2'-O-methyladenosine-3'-phosphate
  modified_base 13: mod_base = OTHER; note = 2'-O-methylcytidine-3'-phosphate
  modified_base 14: mod_base = OTHER; note = 2'-fluorouridine-3'-phosphate
  modified_base 15: mod_base = OTHER; note = 2'-O-methylguanosine-3'-phosphate
  modified_base 16: mod_base = OTHER; note = 2'-fluoroguanosine-3'-phosphate
  modified_base 17: mod_base = OTHER; note = 2'-O-methyladenosine-3'-phosphate
  modified_base 18: mod_base = OTHER; note = 2'-O-methyluridine-3'-phosphate
  modified_base 19: mod_base = OTHER; note = 2'-O-methylcytidine-3'-phosphate
  modified_base 20: mod_base = OTHER; note = 2'-O-methylcytidine-3'-phosphate
  modified_base 21: mod_base = OTHER; note = 2'-O-methylcytidine-3'- phosphorothioate
  modified_base 22: mod_base = OTHER; note = 2'-O-methyladenosine-3'- phosphorothioate
  modified_base 23: mod_base = OTHER; note = 2'-O-methylguanosine-3'-phosphate
tggatttatacactggatcccag

SEQ ID NO: 3916 - RNA, 23 nt, synthetic construct
  source 1..23: mol_type = other RNA
  modified_base 1: mod_base = OTHER; note = 2'-O-methyluridine-3'-phosphorothioate
  modified_base 2: mod_base = OTHER; note = 2'-fluorouridine -3'-phosphorothioate
  modified_base 3: mod_base = OTHER; note = 2'-O-methylcytidine-3'-phosphate
  modified_base 4: mod_base = OTHER; note = 2'-O-methyladenosine-3'-phosphate
  modified_base 5: mod_base = OTHER; note = 2'-O-methylcytidine-3'-phosphate
  modified_base 6: mod_base = OTHER; note = 2'-fluorouridine-3'-phosphate
  modified_base 7: mod_base = OTHER; note = 2'-O-methylguanosine-3'-phosphate
  modified_base 8: mod_base = OTHER; note = 2'-fluorouridine-3'-phosphate
  modified_base 9: mod_base = OTHER; note = 2'-fluorouridine-3'-phosphate
  modified_base 10: mod_base = OTHER; note = 2'-O-methylcytidine-3'-phosphate
  modified_base 11: mod_base = OTHER; note = 2'-O-methyladenosine-3'-phosphate
  modified_base 12: mod_base = OTHER; note = 2'-O-methyladenosine-3'-phosphate
  modified_base 13: mod_base = OTHER; note = 2'-O-methylguanosine-3'-phosphate
  modified_base 14: mod_base = OTHER; note = 2'-fluoroguanosine-3'-phosphate
  modified_base 15: mod_base = OTHER; note = 2'-O-methyluridine-3'-phosphate
  modified_base 16: mod_base = OTHER; note = 2'-fluorouridine-3'-phosphate
  modified_base 17: mod_base = OTHER; note = 2'-O-methyluridine-3'-phosphate
  modified_base 18: mod_base = OTHER; note = 2'-O-methyladenosine-3'-phosphate
  modified_base 19: mod_base = OTHER; note = 2'-O-methyluridine-3'-phosphate
  modified_base 20: mod_base = OTHER; note = 2'-O-methyluridine-3'-phosphate
  modified_base 21: mod_base = OTHER; note = 2'-O-methylguanosine-3'- phosphorothioate
  modified_base 22: mod_base = OTHER; note = 2'-O-methylguanosine-3'- phosphorothioate
  modified_base 23: mod_base = OTHER; note = 2'-O-methylguanosine-3'-phosphate
ttcactgttcaaggtttattggg

SEQ ID NO: 3917 - RNA, 23 nt, synthetic construct
  source 1..23: mol_type = other RNA
  modified_base 1: mod_base = OTHER; note = 2'-O-methyladenosine-3'- phosphorothioate
  modified_base 2: mod_base = OTHER; note = 2'-fluoroadenosine-3'-phosphorothioate
  modified_base 3: mod_base = OTHER; note = 2'-O-methylguanosine-3'-phosphate
  modified_base 4: mod_base = OTHER; note = 2'-O-methyladenosine-3'-phosphate
  modified_base 5: mod_base = OTHER; note = 2'-O-methyluridine-3'-phosphate
  modified_base 6: mod_base = OTHER; note = 2'-fluoroadenosine-3'-phosphate
  modified_base 7: mod_base = OTHER; note = 2'-O-methylcytidine-3'-phosphate
  modified_base 8: mod_base = OTHER; note = 2'-fluorouridine-3'-phosphate
  modified_base 9: mod_base = OTHER; note = 2'-fluoroguanosine-3'-phosphate
  modified_base 10: mod_base = OTHER; note = 2'-O-methyladenosine-3'-phosphate
  modified_base 11: mod_base = OTHER; note = 2'-O-methyluridine-3'-phosphate
  modified_base 12: mod_base = OTHER; note = 2'-O-methylguanosine-3'-phosphate
  modified_base 13: mod_base = OTHER; note = 2'-O-methylguanosine-3'-phosphate
  modified_base 14: mod_base = OTHER; note = 2'-fluorocytidine-3'-phosphate
  modified_base 15: mod_base = OTHER; note = 2'-O-methyladenosine-3'-phosphate
  modified_base 16: mod_base = OTHER; note = 2'-fluorocytidine-3'-phosphate
  modified_base 17: mod_base = OTHER; note = 2'-O-methyladenosine-3'-phosphate
  modified_base 18: mod_base = OTHER; note = 2'-O-methylguanosine-3'-phosphate
  modified_base 19: mod_base = OTHER; note = 2'-O-methylguanosine-3'-phosphate
  modified_base 20: mod_base = OTHER; note = 2'-O-methylcytidine-3'-phosphate
  modified_base 21: mod_base = OTHER; note = 2'-O-methylcytidine-3'- phosphorothioate
  modified_base 22: mod_base = OTHER; note = 2'-O-methyladenosine-3'- phosphorothioate
  modified_base 23: mod_base = OTHER; note = 2'-O-methyluridine-3'-phosphate
aagatactgatggcacaggccat

SEQ ID NO: 3918 - RNA, 23 nt, synthetic construct
  source 1..23: mol_type = other RNA
  modified_base 1: mod_base = OTHER; note = 2'-O-methyluridine-3'-phosphorothioate
  modified_base 2: mod_base = OTHER; note = 2'-fluoroguanosine-3'-phosphorothioate
  modified_base 3: mod_base = OTHER; note = 2'-O-methyluridine-3'-phosphate
  modified_base 4: mod_base = OTHER; note = 2'-O-methylcytidine-3'-phosphate
  modified_base 5: mod_base = OTHER; note = 2'-O-methyluridine-3'-phosphate
  modified_base 6: mod_base = OTHER; note = 2'-fluorouridine-3'-phosphate
  modified_base 7: mod_base = OTHER; note = 2'-O-methylcytidine-3'-phosphate
  modified_base 8: mod_base = OTHER; note = 2'-fluoroguanosine-3'-phosphate
  modified_base 9: mod_base = OTHER; note = 2'-fluoroadenosine-3'-phosphate
  modified_base 10: mod_base = OTHER; note = 2'-O-methyluridine-3'-phosphate
  modified_base 11: mod_base = OTHER; note = 2'-O-methylguanosine-3'-phosphate
  modified_base 12: mod_base = OTHER; note = 2'-O-methyladenosine-3'-phosphate
  modified_base 13: mod_base = OTHER; note = 2'-O-methylcytidine-3'-phosphate
  modified_base 14: mod_base = OTHER; note = 2'-fluoroadenosine-3'-phosphate
  modified_base 15: mod_base = OTHER; note = 2'-O-methyluridine-3'-phosphate
  modified_base 16: mod_base = OTHER; note = 2'-fluorocytidine-3'-phosphate
  modified_base 17: mod_base = OTHER; note = 2'-O-methyladenosine-3'-phosphate
  modified_base 18: mod_base = OTHER; note = 2'-O-methyladenosine-3'-phosphate
  modified_base 19: mod_base = OTHER; note = 2'-O-methylcytidine-3'-phosphate
  modified_base 20: mod_base = OTHER; note = 2'-O-methyladenosine-3'-phosphate
  modified_base 21: mod_base = OTHER; note = 2'-O-methyladenosine-3'- phosphorothioate
  modified_base 22: mod_base = OTHER; note = 2'-O-methylguanosine-3'- phosphorothioate
  modified_base 23: mod_base = OTHER; note = 2'-O-methyladenosine-3'-phosphate
tgtcttcgatgacatcaacaaga

SEQ ID NO: 3919 - RNA, 23 nt, synthetic construct
  source 1..23: mol_type = other RNA
  modified_base 1: mod_base = OTHER; note = 2'-O-methyladenosine-3'- phosphorothioate
  modified_base 2: mod_base = OTHER; note = 2'-fluorouridine -3'-phosphorothioate
  modified_base 3: mod_base = OTHER; note = 2'-O-methyluridine-3'-phosphate
  modified_base 4: mod_base = OTHER; note = 2'-O-methyladenosine-3'-phosphate
  modified_base 5: mod_base = OTHER; note = 2'-O-methyluridine-3'-phosphate
  modified_base 6: mod_base = OTHER; note = 2'-fluoroadenosine-3'-phosphate
  modified_base 7: mod_base = OTHER; note = 2'-O-methylcytidine-3'-phosphate
  modified_base 8: mod_base = OTHER; note = 2'-fluorouridine-3'-phosphate
  modified_base 9: mod_base = OTHER; note = 2'-fluorocytidine-3'-phosphate
  modified_base 10: mod_base = OTHER; note = 2'-O-methyluridine-3'-phosphate
  modified_base 11: mod_base = OTHER; note = 2'-O-methylcytidine-3'-phosphate
  modified_base 12: mod_base = OTHER; note = 2'-O-methyluridine-3'-phosphate
  modified_base 13: mod_base = OTHER; note = 2'-O-methylguanosine-3'-phosphate
  modified_base 14: mod_base = OTHER; note = 2'-fluorocytidine-3'-phosphate
  modified_base 15: mod_base = OTHER; note = 2'-O-methylcytidine-3'-phosphate
  modified_base 16: mod_base = OTHER; note = 2'-fluoroadenosine-3'-phosphate
  modified_base 17: mod_base = OTHER; note = 2'-O-methyladenosine-3'-phosphate
  modified_base 18: mod_base = OTHER; note = 2'-O-methyladenosine-3'-phosphate
  modified_base 19: mod_base = OTHER; note = 2'-O-methyluridine-3'-phosphate
  modified_base 20: mod_base = OTHER; note = 2'-O-methylcytidine-3'-phosphate
  modified_base 21: mod_base = OTHER; note = 2'-O-methyluridine-3'-phosphorothioate
  modified_base 22: mod_base = OTHER; note = 2'-O-methylguanosine-3'- phosphorothioate
  modified_base 23: mod_base = OTHER; note = 2'-O-methylcytidine-3'-phosphate
attatactctctgccaaatctgc

SEQ ID NO: 3920 - RNA, 23 nt, synthetic construct
  source 1..23: mol_type = other RNA
  modified_base 1: mod_base = OTHER; note = 2'-O-methyluridine-3'-phosphorothioate
  modified_base 2: mod_base = OTHER; note = 2'-fluoroadenosine-3'-phosphorothioate
  modified_base 3: mod_base = OTHER; note = 2'-O-methylcytidine-3'-phosphate
  modified_base 4: mod_base = OTHER; note = 2'-O-methylcytidine-3'-phosphate
  modified_base 5: mod_base = OTHER; note = 2'-O-methylcytidine-3'-phosphate
  modified_base 6: mod_base = OTHER; note = 2'-fluorouridine-3'-phosphate
  modified_base 7: mod_base = OTHER; note = 2'-O-methyluridine-3'-phosphate
  modified_base 8: mod_base = OTHER; note = 2'-fluoroadenosine-3'-phosphate
  modified_base 9: mod_base = OTHER; note = 2'-fluoroadenosine-3'-phosphate
  modified_base 10: mod_base = OTHER; note = 2'-O-methyluridine-3'-phosphate
  modified_base 11: mod_base = OTHER; note = 2'-O-methylcytidine-3'-phosphate
  modified_base 12: mod_base = OTHER; note = 2'-O-methyladenosine-3'-phosphate
  modified_base 13: mod_base = OTHER; note = 2'-O-methyluridine-3'-phosphate
  modified_base 14: mod_base = OTHER; note = 2'-fluoroguanosine-3'-phosphate
  modified_base 15: mod_base = OTHER; note = 2'-O-methylguanosine-3'-phosphate
  modified_base 16: mod_base = OTHER; note = 2'-fluorouridine-3'-phosphate
  modified_base 17: mod_base = OTHER; note = 2'-O-methylguanosine-3'-phosphate
  modified_base 18: mod_base = OTHER; note = 2'-O-methylguanosine-3'-phosphate
  modified_base 19: mod_base = OTHER; note = 2'-O-methyladenosine-3'-phosphate
  modified_base 20: mod_base = OTHER; note = 2'-O-methyladenosine-3'-phosphate
  modified_base 21: mod_base = OTHER; note = 2'-O-methyladenosine-3'- phosphorothioate
  modified_base 22: mod_base = OTHER; note = 2'-O-methylcytidine-3'- phosphorothioate
  modified_base 23: mod_base = OTHER; note = 2'-O-methyluridine-3'-phosphate
tacccttaatcatggtggaaact

SEQ ID NO: 3921 - RNA, 23 nt, synthetic construct
  source 1..23: mol_type = other RNA
  modified_base 1: mod_base = OTHER; note = 2'-O-methyluridine-3'-phosphorothioate
  modified_base 2: mod_base = OTHER; note = 2'-fluoroadenosine-3'-phosphorothioate
  modified_base 3: mod_base = OTHER; note = 2'-O-methylguanosine-3'-phosphate
  modified_base 4: mod_base = OTHER; note = 2'-O-methyladenosine-3'-phosphate
  modified_base 5: mod_base = OTHER; note = 2'-O-methyladenosine-3'-phosphate
  modified_base 6: mod_base = OTHER; note = 2'-fluorouridine-3'-phosphate
  modified_base 7: mod_base = OTHER; note = 2'-O-methylcytidine-3'-phosphate
  modified_base 8: mod_base = OTHER; note = 2'-fluorocytidine-3'-phosphate
  modified_base 9: mod_base = OTHER; note = 2'-fluorouridine-3'-phosphate
  modified_base 10: mod_base = OTHER; note = 2'-O-methylguanosine-3'-phosphate
  modified_base 11: mod_base = OTHER; note = 2'-O-methyluridine-3'-phosphate
  modified_base 12: mod_base = OTHER; note = 2'-O-methyluridine-3'-phosphate
  modified_base 13: mod_base = OTHER; note = 2'-O-methylguanosine-3'-phosphate
  modified_base 14: mod_base = OTHER; note = 2'-fluorouridine-3'-phosphate
  modified_base 15: mod_base = OTHER; note = 2'-O-methyladenosine-3'-phosphate
  modified_base 16: mod_base = OTHER; note = 2'-fluoroguanosine-3'-phosphate
  modified_base 17: mod_base = OTHER; note = 2'-O-methylcytidine-3'-phosphate
  modified_base 18: mod_base = OTHER; note = 2'-O-methylcytidine-3'-phosphate
  modified_base 19: mod_base = OTHER; note = 2'-O-methyluridine-3'-phosphate
  modified_base 20: mod_base = OTHER; note = 2'-O-methyladenosine-3'-phosphate
  modified_base 21: mod_base = OTHER; note = 2'-O-methylguanosine-3'- phosphorothioate
  modified_base 22: mod_base = OTHER; note = 2'-O-methyladenosine-3'- phosphorothioate
  modified_base 23: mod_base = OTHER; note = 2'-O-methylcytidine-3'-phosphate
tagaatcctgttgtagcctagac

SEQ ID NO: 3922 - RNA, 23 nt, synthetic construct
  source 1..23: mol_type = other RNA
  modified_base 1: mod_base = OTHER; note = 2'-O-methyluridine-3'-phosphorothioate
  modified_base 2: mod_base = OTHER; note = 2'-fluoroguanosine-3'-phosphorothioate
  modified_base 3: mod_base = OTHER; note = 2'-O-methyladenosine-3'-phosphate
  modified_base 4: mod_base = OTHER; note = 2'-O-methylcytidine-3'-phosphate
  modified_base 5: mod_base = OTHER; note = 2'-O-methyladenosine-3'-phosphate
  modified_base 6: mod_base = OTHER; note = 2'-fluoroadenosine-3'-phosphate
  modified_base 7: mod_base = OTHER; note = 2'-O-methylcytidine-3'-phosphate
  modified_base 8: mod_base = OTHER; note = 2'-fluoroadenosine-3'-phosphate
  modified_base 9: mod_base = OTHER; note = 2'-fluorouridine-3'-phosphate
  modified_base 10: mod_base = OTHER; note = 2'-O-methylguanosine-3'-phosphate
  modified_base 11: mod_base = OTHER; note = 2'-O-methylcytidine-3'-phosphate
  modified_base 12: mod_base = OTHER; note = 2'-O-methyladenosine-3'-phosphate
  modified_base 13: mod_base = OTHER; note = 2'-O-methylcytidine-3'-phosphate
  modified_base 14: mod_base = OTHER; note = 2'-fluoroadenosine-3'-phosphate
  modified_base 15: mod_base = OTHER; note = 2'-O-methyladenosine-3'-phosphate
  modified_base 16: mod_base = OTHER; note = 2'-fluorocytidine-3'-phosphate
  modified_base 17: mod_base = OTHER; note = 2'-O-methylcytidine-3'-phosphate
  modified_base 18: mod_base = OTHER; note = 2'-O-methyluridine-3'-phosphate
  modified_base 19: mod_base = OTHER; note = 2'-O-methylcytidine-3'-phosphate
  modified_base 20: mod_base = OTHER; note = 2'-O-methylcytidine-3'-phosphate
  modified_base 21: mod_base = OTHER; note = 2'-O-methyladenosine-3'- phosphorothioate
  modified_base 22: mod_base = OTHER; note = 2'-O-methylcytidine-3'- phosphorothioate
  modified_base 23: mod_base = OTHER; note = 2'-O-methylcytidine-3'-phosphate
tgacaacatgcacaacctccacc

SEQ ID NO: 3923 - RNA, 23 nt, synthetic construct
  source 1..23: mol_type = other RNA
  modified_base 1: mod_base = OTHER; note = 2'-O-methyladenosine-3'- phosphorothioate
  modified_base 2: mod_base = OTHER; note = 2'-fluoroguanosine-3'-phosphorothioate
  modified_base 3: mod_base = OTHER; note = 2'-O-methylguanosine-3'-phosphate
  modified_base 4: mod_base = OTHER; note = 2'-O-methylcytidine-3'-phosphate
  modified_base 5: mod_base = OTHER; note = 2'-O-methyladenosine-3'-phosphate
  modified_base 6: mod_base = OTHER; note = 2'-fluorouridine-3'-phosphate
  modified_base 7: mod_base = OTHER; note = 2'-O-methylguanosine-3'-phosphate
  modified_base 8: mod_base = OTHER; note = 2'-fluorouridine-3'-phosphate
  modified_base 9: mod_base = OTHER; note = 2'-fluorouridine-3'-phosphate
  modified_base 10: mod_base = OTHER; note = 2'-O-methylcytidine-3'-phosphate
  modified_base 11: mod_base = OTHER; note = 2'-O-methyladenosine-3'-phosphate
  modified_base 12: mod_base = OTHER; note = 2'-O-methylguanosine-3'-phosphate
  modified_base 13: mod_base = OTHER; note = 2'-O-methyluridine-3'-phosphate
  modified_base 14: mod_base = OTHER; note = 2'-fluoroguanosine-3'-phosphate
  modified_base 15: mod_base = OTHER; note = 2'-O-methyladenosine-3'-phosphate
  modified_base 16: mod_base = OTHER; note = 2'-fluoroadenosine-3'-phosphate
  modified_base 17: mod_base = OTHER; note = 2'-O-methylguanosine-3'-phosphate
  modified_base 18: mod_base = OTHER; note = 2'-O-methylguanosine-3'-phosphate
  modified_base 19: mod_base = OTHER; note = 2'-O-methyladenosine-3'-phosphate
  modified_base 20: mod_base = OTHER; note = 2'-O-methylguanosine-3'-phosphate
  modified_base 21: mod_base = OTHER; note = 2'-O-methylcytidine-3'- phosphorothioate
  modified_base 22: mod_base = OTHER; note = 2'-O-methylcytidine-3'- phosphorothioate
  modified_base 23: mod_base = OTHER; note = 2'-O-methyladenosine-3'-phosphate
aggcatgttcagtgaaggagcca

SEQ ID NO: 3924 - RNA, 23 nt, synthetic construct
  source 1..23: mol_type = other RNA
  modified_base 1: mod_base = OTHER; note = 2'-O-methyluridine-3'-phosphorothioate
  modified_base 2: mod_base = OTHER; note = 2'-fluoroadenosine-3'-phosphorothioate
  modified_base 3: mod_base = OTHER; note = 2'-O-methyluridine-3'-phosphate
  modified_base 4: mod_base = OTHER; note = 2'-O-methyluridine-3'-phosphate
  modified_base 5: mod_base = OTHER; note = 2'-O-methylguanosine-3'-phosphate
  modified_base 6: mod_base = OTHER; note = 2'-fluoroguanosine-3'-phosphate
  modified_base 7: mod_base = OTHER; note = 2'-O-methyladenosine-3'-phosphate
  modified_base 8: mod_base = OTHER; note = 2'-fluorocytidine-3'-phosphate
  modified_base 9: mod_base = OTHER; note = 2'-fluorouridine-3'-phosphate
  modified_base 10: mod_base = OTHER; note = 2'-O-methyluridine-3'-phosphate
  modified_base 11: mod_base = OTHER; note = 2'-O-methylguanosine-3'-phosphate
  modified_base 12: mod_base = OTHER; note = 2'-O-methylguanosine-3'-phosphate
  modified_base 13: mod_base = OTHER; note = 2'-O-methyladenosine-3'-phosphate
  modified_base 14: mod_base = OTHER; note = 2'-fluoroadenosine-3'-phosphate
  modified_base 15: mod_base = OTHER; note = 2'-O-methylcytidine-3'-phosphate
  modified_base 16: mod_base = OTHER; note = 2'-fluorocytidine-3'-phosphate
  modified_base 17: mod_base = OTHER; note = 2'-O-methyladenosine-3'-phosphate
  modified_base 18: mod_base = OTHER; note = 2'-O-methyladenosine-3'-phosphate
  modified_base 19: mod_base = OTHER; note = 2'-O-methyladenosine-3'-phosphate
  modified_base 20: mod_base = OTHER; note = 2'-O-methyladenosine-3'-phosphate
  modified_base 21: mod_base = OTHER; note = 2'-O-methylguanosine-3'- phosphorothioate
  modified_base 22: mod_base = OTHER; note = 2'-O-methylguanosine-3'- phosphorothioate
  modified_base 23: mod_base = OTHER; note = 2'-O-methyladenosine-3'-phosphate
tattggacttggaaccaaaagga

SEQ ID NO: 3925 - RNA, 23 nt, synthetic construct
  source 1..23: mol_type = other RNA
  modified_base 1: mod_base = OTHER; note = 2'-O-methyluridine-3'-phosphorothioate
  modified_base 2: mod_base = OTHER; note = 2'-fluoroadenosine-3'-phosphorothioate
  modified_base 3: mod_base = OTHER; note = 2'-O-methyladenosine-3'-phosphate
  modified_base 4: mod_base = OTHER; note = 2'-O-methylguanosine-3'-phosphate
  modified_base 5: mod_base = OTHER; note = 2'-O-methyladenosine-3'-phosphate
  modified_base 6: mod_base = OTHER; note = 2'-fluorouridine-3'-phosphate
  modified_base 7: mod_base = OTHER; note = 2'-O-methyladenosine-3'-phosphate
  modified_base 8: mod_base = OTHER; note = 2'-fluorocytidine-3'-phosphate
  modified_base 9: mod_base = OTHER; note = 2'-fluorouridine-3'-phosphate
  modified_base 10: mod_base = OTHER; note = 2'-O-methylguanosine-3'-phosphate
  modified_base 11: mod_base = OTHER; note = 2'-O-methyladenosine-3'-phosphate
  modified_base 12: mod_base = OTHER; note = 2'-O-methyluridine-3'-phosphate
  modified_base 13: mod_base = OTHER; note = 2'-O-methylguanosine-3'-phosphate
  modified_base 14: mod_base = OTHER; note = 2'-fluoroguanosine-3'-phosphate
  modified_base 15: mod_base = OTHER; note = 2'-O-methylcytidine-3'-phosphate
  modified_base 16: mod_base = OTHER; note = 2'-fluoroadenosine-3'-phosphate
  modified_base 17: mod_base = OTHER; note = 2'-O-methylcytidine-3'-phosphate
  modified_base 18: mod_base = OTHER; note = 2'-O-methyladenosine-3'-phosphate
  modified_base 19: mod_base = OTHER; note = 2'-O-methylguanosine-3'-phosphate
  modified_base 20: mod_base = OTHER; note = 2'-O-methylguanosine-3'-phosphate
  modified_base 21: mod_base = OTHER; note = 2'-O-methylcytidine-3'- phosphorothioate
  modified_base 22: mod_base = OTHER; note = 2'-O-methylcytidine-3'- phosphorothioate
  modified_base 23: mod_base = OTHER; note = 2'-O-methyladenosine-3'-phosphate
taagatactgatggcacaggcca

SEQ ID NO: 3926 - RNA, 23 nt, synthetic construct
  source 1..23: mol_type = other RNA
  modified_base 1: mod_base = OTHER; note = 2'-O-methyluridine-3'-phosphorothioate
  modified_base 2: mod_base = OTHER; note = 2'-fluoroadenosine-3'-phosphorothioate
  modified_base 3: mod_base = OTHER; note = 2'-O-methylguanosine-3'-phosphate
  modified_base 4: mod_base = OTHER; note = 2'-O-methyluridine-3'-phosphate
  modified_base 5: mod_base = OTHER; note = 2'-O-methyluridine-3'-phosphate
  modified_base 6: mod_base = OTHER; note = 2'-fluorouridine-3'-phosphate
  modified_base 7: mod_base = OTHER; note = 2'-O-methylguanosine-3'-phosphate
  modified_base 8: mod_base = OTHER; note = 2'-fluoroadenosine-3'-phosphate
  modified_base 9: mod_base = OTHER; note = 2'-fluorouridine-3'-phosphate
  modified_base 10: mod_base = OTHER; note = 2'-O-methylcytidine-3'-phosphate
  modified_base 11: mod_base = OTHER; note = 2'-O-methyladenosine-3'-phosphate
  modified_base 12: mod_base = OTHER; note = 2'-O-methylcytidine-3'-phosphate
  modified_base 13: mod_base = OTHER; note = 2'-O-methylcytidine-3'-phosphate
  modified_base 14: mod_base = OTHER; note = 2'-fluorouridine-3'-phosphate
  modified_base 15: mod_base = OTHER; note = 2'-O-methylcytidine-3'-phosphate
  modified_base 16: mod_base = OTHER; note = 2'-fluoroadenosine-3'-phosphate
  modified_base 17: mod_base = OTHER; note = 2'-O-methyluridine-3'-phosphate
  modified_base 18: mod_base = OTHER; note = 2'-O-methyladenosine-3'-phosphate
  modified_base 19: mod_base = OTHER; note = 2'-O-methyladenosine-3'-phosphate
  modified_base 20: mod_base = OTHER; note = 2'-O-methylguanosine-3'-phosphate
  modified_base 21: mod_base = OTHER; note = 2'-O-methylcytidine-3'- phosphorothioate
  modified_base 22: mod_base = OTHER; note = 2'-O-methyladenosine-3'- phosphorothioate
  modified_base 23: mod_base = OTHER; note = 2'-O-methylcytidine-3'-phosphate
tagtttgatcacctcataagcac

SEQ ID NO: 3927 - RNA, 23 nt, synthetic construct
  source 1..23: mol_type = other RNA
  modified_base 1: mod_base = OTHER; note = 2'-O-methyluridine-3'-phosphorothioate
  modified_base 2: mod_base = OTHER; note = 2'-fluoroguanosine-3'-phosphorothioate
  modified_base 3: mod_base = OTHER; note = 2'-O-methyladenosine-3'-phosphate
  modified_base 4: mod_base = OTHER; note = 2'-O-methylguanosine-3'-phosphate
  modified_base 5: mod_base = OTHER; note = 2'-O-methyluridine-3'-phosphate
  modified_base 6: mod_base = OTHER; note = 2'-fluorouridine-3'-phosphate
  modified_base 7: mod_base = OTHER; note = 2'-O-methyluridine-3'-phosphate
  modified_base 8: mod_base = OTHER; note = 2'-fluoroguanosine-3'-phosphate
  modified_base 9: mod_base = OTHER; note = 2'-fluoroadenosine-3'-phosphate
  modified_base 10: mod_base = OTHER; note = 2'-O-methyluridine-3'-phosphate
  modified_base 11: mod_base = OTHER; note = 2'-O-methylcytidine-3'-phosphate
  modified_base 12: mod_base = OTHER; note = 2'-O-methyladenosine-3'-phosphate
  modified_base 13: mod_base = OTHER; note = 2'-O-methylcytidine-3'-phosphate
  modified_base 14: mod_base = OTHER; note = 2'-fluorocytidine-3'-phosphate
  modified_base 15: mod_base = OTHER; note = 2'-O-methyluridine-3'-phosphate
  modified_base 16: mod_base = OTHER; note = 2'-fluorocytidine-3'-phosphate
  modified_base 17: mod_base = OTHER; note = 2'-O-methyladenosine-3'-phosphate
  modified_base 18: mod_base = OTHER; note = 2'-O-methyluridine-3'-phosphate
  modified_base 19: mod_base = OTHER; note = 2'-O-methyladenosine-3'-phosphate
  modified_base 20: mod_base = OTHER; note = 2'-O-methyladenosine-3'-phosphate
  modified_base 21: mod_base = OTHER; note = 2'-O-methylguanosine-3'- phosphorothioate
  modified_base 22: mod_base = OTHER; note = 2'-O-methylcytidine-3'- phosphorothioate
  modified_base 23: mod_base = OTHER; note = 2'-O-methyladenosine-3'-phosphate
tgagtttgatcacctcataagca

SEQ ID NO: 3928 - RNA, 23 nt, synthetic construct
  source 1..23: mol_type = other RNA
  modified_base 1: mod_base = OTHER; note = 2'-O-methyladenosine-3'- phosphorothioate
  modified_base 2: mod_base = OTHER; note = 2'-fluorouridine -3'-phosphorothioate
  modified_base 3: mod_base = OTHER; note = 2'-O-methyluridine-3'-phosphate
  modified_base 4: mod_base = OTHER; note = 2'-O-methylcytidine-3'-phosphate
  modified_base 5: mod_base = OTHER; note = 2'-O-methyluridine-3'-phosphate
  modified_base 6: mod_base = OTHER; note = 2'-fluoroguanosine-3'-phosphate
  modified_base 7: mod_base = OTHER; note = 2'-O-methyluridine-3'-phosphate
  modified_base 8: mod_base = OTHER; note = 2'-fluorocytidine-3'-phosphate
  modified_base 9: mod_base = OTHER; note = 2'-fluorocytidine-3'-phosphate
  modified_base 10: mod_base = OTHER; note = 2'-O-methylcytidine-3'-phosphate
  modified_base 11: mod_base = OTHER; note = 2'-O-methyladenosine-3'-phosphate
  modified_base 12: mod_base = OTHER; note = 2'-O-methyladenosine-3'-phosphate
  modified_base 13: mod_base = OTHER; note = 2'-O-methyladenosine-3'-phosphate
  modified_base 14: mod_base = OTHER; note = 2'-fluoroadenosine-3'-phosphate
  modified_base 15: mod_base = OTHER; note = 2'-O-methyluridine-3'-phosphate
  modified_base 16: mod_base = OTHER; note = 2'-fluoroguanosine-3'-phosphate
  modified_base 17: mod_base = OTHER; note = 2'-O-methylcytidine-3'-phosphate
  modified_base 18: mod_base = OTHER; note = 2'-O-methyladenosine-3'-phosphate
  modified_base 19: mod_base = OTHER; note = 2'-O-methyladenosine-3'-phosphate
  modified_base 20: mod_base = OTHER; note = 2'-O-methylguanosine-3'-phosphate
  modified_base 21: mod_base = OTHER; note = 2'-O-methylguanosine-3'- phosphorothioate
  modified_base 22: mod_base = OTHER; note = 2'-O-methyladenosine-3'- phosphorothioate
  modified_base 23: mod_base = OTHER; note = 2'-O-methyladenosine-3'-phosphate
attctgtcccaaaatgcaaggaa

SEQ ID NO: 3929 - RNA, 23 nt, synthetic construct
  source 1..23: mol_type = other RNA
  modified_base 1: mod_base = OTHER; note = 2'-O-methyluridine-3'-phosphorothioate
  modified_base 2: mod_base = OTHER; note = 2'-fluoroguanosine-3'-phosphorothioate
  modified_base 3: mod_base = OTHER; note = 2'-O-methylcytidine-3'-phosphate
  modified_base 4: mod_base = OTHER; note = 2'-O-methylcytidine-3'-phosphate
  modified_base 5: mod_base = OTHER; note = 2'-O-methyladenosine-3'-phosphate
  modified_base 6: mod_base = OTHER; note = 2'-fluorouridine-3'-phosphate
  modified_base 7: mod_base = OTHER; note = 2'-O-methyladenosine-3'-phosphate
  modified_base 8: mod_base = OTHER; note = 2'-fluorouridine-3'-phosphate
  modified_base 9: mod_base = OTHER; note = 2'-fluorouridine-3'-phosphate
  modified_base 10: mod_base = OTHER; note = 2'-O-methylguanosine-3'-phosphate
  modified_base 11: mod_base = OTHER; note = 2'-O-methylguanosine-3'-phosphate
  modified_base 12: mod_base = OTHER; note = 2'-O-methyladenosine-3'-phosphate
  modified_base 13: mod_base = OTHER; note = 2'-O-methylcytidine-3'-phosphate
  modified_base 14: mod_base = OTHER; note = 2'-fluorouridine-3'-phosphate
  modified_base 15: mod_base = OTHER; note = 2'-O-methyluridine-3'-phosphate
  modified_base 16: mod_base = OTHER; note = 2'-fluoroguanosine-3'-phosphate
  modified_base 17: mod_base = OTHER; note = 2'-O-methylguanosine-3'-phosphate
  modified_base 18: mod_base = OTHER; note = 2'-O-methyladenosine-3'-phosphate
  modified_base 19: mod_base = OTHER; note = 2'-O-methyladenosine-3'-phosphate
  modified_base 20: mod_base = OTHER; note = 2'-O-methylcytidine-3'-phosphate
  modified_base 21: mod_base = OTHER; note = 2'-O-methylcytidine-3'- phosphorothioate
  modified_base 22: mod_base = OTHER; note = 2'-O-methyladenosine-3'- phosphorothioate
  modified_base 23: mod_base = OTHER; note = 2'-O-methyladenosine-3'-phosphate
tgccatattggacttggaaccaa

SEQ ID NO: 3930 - RNA, 23 nt, synthetic construct
  source 1..23: mol_type = other RNA
  modified_base 1: mod_base = OTHER; note = 2'-O-methyluridine-3'-phosphorothioate
  modified_base 2: mod_base = OTHER; note = 2'-fluorocytidine-3'-phosphorothioate
  modified_base 3: mod_base = OTHER; note = 2'-O-methyluridine-3'-phosphate
  modified_base 4: mod_base = OTHER; note = 2'-O-methylguanosine-3'-phosphate
  modified_base 5: mod_base = OTHER; note = 2'-O-methyluridine-3'-phosphate
  modified_base 6: mod_base = OTHER; note = 2'-fluorouridine-3'-phosphate
  modified_base 7: mod_base = OTHER; note = 2'-O-methylguanosine-3'-phosphate
  modified_base 8: mod_base = OTHER; note = 2'-fluorouridine-3'-phosphate
  modified_base 9: mod_base = OTHER; note = 2'-fluoroadenosine-3'-phosphate
  modified_base 10: mod_base = OTHER; note = 2'-O-methylguanosine-3'-phosphate
  modified_base 11: mod_base = OTHER; note = 2'-O-methylcytidine-3'-phosphate
  modified_base 12: mod_base = OTHER; note = 2'-O-methylcytidine-3'-phosphate
  modified_base 13: mod_base = OTHER; note = 2'-O-methyluridine-3'-phosphate
  modified_base 14: mod_base = OTHER; note = 2'-fluoroadenosine-3'-phosphate
  modified_base 15: mod_base = OTHER; note = 2'-O-methylguanosine-3'-phosphate
  modified_base 16: mod_base = OTHER; note = 2'-fluoroadenosine-3'-phosphate
  modified_base 17: mod_base = OTHER; note = 2'-O-methylcytidine-3'-phosphate
  modified_base 18: mod_base = OTHER; note = 2'-O-methyladenosine-3'-phosphate
  modified_base 19: mod_base = OTHER; note = 2'-O-methylguanosine-3'-phosphate
  modified_base 20: mod_base = OTHER; note = 2'-O-methyluridine-3'-phosphate
  modified_base 21: mod_base = OTHER; note = 2'-O-methylguanosine-3'- phosphorothioate
  modified_base 22: mod_base = OTHER; note = 2'-O-methyladenosine-3'- phosphorothioate
  modified_base 23: mod_base = OTHER; note = 2'-O-methyladenosine-3'-phosphate
tctgttgtagcctagacagtgaa

SEQ ID NO: 3931 - RNA, 23 nt, synthetic construct
  source 1..23: mol_type = other RNA
  modified_base 1: mod_base = OTHER; note = 2'-O-methyluridine-3'-phosphorothioate
  modified_base 2: mod_base = OTHER; note = 2'-fluorocytidine-3'-phosphorothioate
  modified_base 3: mod_base = OTHER; note = 2'-O-methylcytidine-3'-phosphate
  modified_base 4: mod_base = OTHER; note = 2'-O-methyluridine-3'-phosphate
  modified_base 5: mod_base = OTHER; note = 2'-O-methylguanosine-3'-phosphate
  modified_base 6: mod_base = OTHER; note = 2'-fluorouridine-3'-phosphate
  modified_base 7: mod_base = OTHER; note = 2'-O-methyluridine-3'-phosphate
  modified_base 8: mod_base = OTHER; note = 2'-fluoroguanosine-3'-phosphate
  modified_base 9: mod_base = OTHER; note = 2'-fluorouridine-3'-phosphate
  modified_base 10: mod_base = OTHER; note = 2'-O-methyladenosine-3'-phosphate
  modified_base 11: mod_base = OTHER; note = 2'-O-methylguanosine-3'-phosphate
  modified_base 12: mod_base = OTHER; note = 2'-O-methylcytidine-3'-phosphate
  modified_base 13: mod_base = OTHER; note = 2'-O-methylcytidine-3'-phosphate
  modified_base 14: mod_base = OTHER; note = 2'-fluorouridine-3'-phosphate
  modified_base 15: mod_base = OTHER; note = 2'-O-methyladenosine-3'-phosphate
  modified_base 16: mod_base = OTHER; note = 2'-fluoroguanosine-3'-phosphate
  modified_base 17: mod_base = OTHER; note = 2'-O-methyladenosine-3'-phosphate
  modified_base 18: mod_base = OTHER; note = 2'-O-methylcytidine-3'-phosphate
  modified_base 19: mod_base = OTHER; note = 2'-O-methyladenosine-3'-phosphate
  modified_base 20: mod_base = OTHER; note = 2'-O-methylguanosine-3'-phosphate
  modified_base 21: mod_base = OTHER; note = 2'-O-methyluridine-3'-phosphorothioate
  modified_base 22: mod_base = OTHER; note = 2'-O-methylguanosine-3'- phosphorothioate
  modified_base 23: mod_base = OTHER; note = 2'-O-methyladenosine-3'-phosphate
tcctgttgtagcctagacagtga

SEQ ID NO: 3932 - RNA, 23 nt, synthetic construct
  source 1..23: mol_type = other RNA
  modified_base 1: mod_base = OTHER; note = 2'-O-methyluridine-3'-phosphorothioate
  modified_base 2: mod_base = OTHER; note = 2'-fluorocytidine-3'-phosphorothioate
  modified_base 3: mod_base = OTHER; note = 2'-O-methylcytidine-3'-phosphate
  modified_base 4: mod_base = OTHER; note = 2'-O-methyladenosine-3'-phosphate
  modified_base 5: mod_base = OTHER; note = 2'-O-methyladenosine-3'-phosphate
  modified_base 6: mod_base = OTHER; note = 2'-fluorocytidine-3'-phosphate
  modified_base 7: mod_base = OTHER; note = 2'-O-methyladenosine-3'-phosphate
  modified_base 8: mod_base = OTHER; note = 2'-fluoroadenosine-3'-phosphate
  modified_base 9: mod_base = OTHER; note = 2'-fluorocytidine-3'-phosphate
  modified_base 10: mod_base = OTHER; note = 2'-O-methyluridine-3'-phosphate
  modified_base 11: mod_base = OTHER; note = 2'-O-methylguanosine-3'-phosphate
  modified_base 12: mod_base = OTHER; note = 2'-O-methyluridine-3'-phosphate
  modified_base 13: mod_base = OTHER; note = 2'-O-methyladenosine-3'-phosphate
  modified_base 14: mod_base = OTHER; note = 2'-fluoroadenosine-3'-phosphate
  modified_base 15: mod_base = OTHER; note = 2'-O-methyluridine-3'-phosphate
  modified_base 16: mod_base = OTHER; note = 2'-fluorocytidine-3'-phosphate
  modified_base 17: mod_base = OTHER; note = 2'-O-methyluridine-3'-phosphate
  modified_base 18: mod_base = OTHER; note = 2'-O-methyluridine-3'-phosphate
  modified_base 19: mod_base = OTHER; note = 2'-O-methyladenosine-3'-phosphate
  modified_base 20: mod_base = OTHER; note = 2'-O-methyluridine-3'-phosphate
  modified_base 21: mod_base = OTHER; note = 2'-O-methyluridine-3'-phosphorothioate
  modified_base 22: mod_base = OTHER; note = 2'-O-methylcytidine-3'- phosphorothioate
  modified_base 23: mod_base = OTHER; note = 2'-O-methyluridine-3'-phosphate
tccaacaactgtaatcttattct

SEQ ID NO: 3933 - RNA, 23 nt, synthetic construct
  source 1..23: mol_type = other RNA
  modified_base 1: mod_base = OTHER; note = 2'-O-methyluridine-3'-phosphorothioate
  modified_base 2: mod_base = OTHER; note = 2'-fluoroadenosine-3'-phosphorothioate
  modified_base 3: mod_base = OTHER; note = 2'-O-methylcytidine-3'-phosphate
  modified_base 4: mod_base = OTHER; note = 2'-O-methylcytidine-3'-phosphate
  modified_base 5: mod_base = OTHER; note = 2'-O-methyluridine-3'-phosphate
  modified_base 6: mod_base = OTHER; note = 2'-fluorocytidine-3'-phosphate
  modified_base 7: mod_base = OTHER; note = 2'-O-methyladenosine-3'-phosphate
  modified_base 8: mod_base = OTHER; note = 2'-fluorouridine-3'-phosphate
  modified_base 9: mod_base = OTHER; note = 2'-fluoroadenosine-3'-phosphate
  modified_base 10: mod_base = OTHER; note = 2'-O-methyladenosine-3'-phosphate
  modified_base 11: mod_base = OTHER; note = 2'-O-methylguanosine-3'-phosphate
  modified_base 12: mod_base = OTHER; note = 2'-O-methylcytidine-3'-phosphate
  modified_base 13: mod_base = OTHER; note = 2'-O-methyladenosine-3'-phosphate
  modified_base 14: mod_base = OTHER; note = 2'-fluorocytidine-3'-phosphate
  modified_base 15: mod_base = OTHER; note = 2'-O-methyluridine-3'-phosphate
  modified_base 16: mod_base = OTHER; note = 2'-fluorocytidine-3'-phosphate
  modified_base 17: mod_base = OTHER; note = 2'-O-methyluridine-3'-phosphate
  modified_base 18: mod_base = OTHER; note = 2'-O-methylcytidine-3'-phosphate
  modified_base 19: mod_base = OTHER; note = 2'-O-methyladenosine-3'-phosphate
  modified_base 20: mod_base = OTHER; note = 2'-O-methyladenosine-3'-phosphate
  modified_base 21: mod_base = OTHER; note = 2'-O-methylcytidine-3'- phosphorothioate
  modified_base 22: mod_base = OTHER; note = 2'-O-methylcytidine-3'- phosphorothioate
  modified_base 23: mod_base = OTHER; note = 2'-O-methyladenosine-3'-phosphate
tacctcataagcactctcaacca

SEQ ID NO: 3934 - RNA, 23 nt, synthetic construct
  source 1..23: mol_type = other RNA
  modified_base 1: mod_base = OTHER; note = 2'-O-methyluridine-3'-phosphorothioate
  modified_base 2: mod_base = OTHER; note = 2'-fluoroadenosine-3'-phosphorothioate
  modified_base 3: mod_base = OTHER; note = 2'-O-methyladenosine-3'-phosphate
  modified_base 4: mod_base = OTHER; note = 2'-O-methyluridine-3'-phosphate
  modified_base 5: mod_base = OTHER; note = 2'-O-methylcytidine-3'-phosphate
  modified_base 6: mod_base = OTHER; note = 2'-fluorocytidine-3'-phosphate
  modified_base 7: mod_base = OTHER; note = 2'-O-methyluridine-3'-phosphate
  modified_base 8: mod_base = OTHER; note = 2'-fluoroguanosine-3'-phosphate
  modified_base 9: mod_base = OTHER; note = 2'-fluorouridine-3'-phosphate
  modified_base 10: mod_base = OTHER; note = 2'-O-methyluridine-3'-phosphate
  modified_base 11: mod_base = OTHER; note = 2'-O-methylguanosine-3'-phosphate
  modified_base 12: mod_base = OTHER; note = 2'-O-methyluridine-3'-phosphate
  modified_base 13: mod_base = OTHER; note = 2'-O-methyladenosine-3'-phosphate
  modified_base 14: mod_base = OTHER; note = 2'-fluoroguanosine-3'-phosphate
  modified_base 15: mod_base = OTHER; note = 2'-O-methylcytidine-3'-phosphate
  modified_base 16: mod_base = OTHER; note = 2'-fluorocytidine-3'-phosphate
  modified_base 17: mod_base = OTHER; note = 2'-O-methyluridine-3'-phosphate
  modified_base 18: mod_base = OTHER; note = 2'-O-methyladenosine-3'-phosphate
  modified_base 19: mod_base = OTHER; note = 2'-O-methylguanosine-3'-phosphate
  modified_base 20: mod_base = OTHER; note = 2'-O-methyladenosine-3'-phosphate
  modified_base 21: mod_base = OTHER; note = 2'-O-methylcytidine-3'- phosphorothioate
  modified_base 22: mod_base = OTHER; note = 2'-O-methyladenosine-3'- phosphorothioate
  modified_base 23: mod_base = OTHER; note = 2'-O-methylguanosine-3'-phosphate
taatcctgttgtagcctagacag

SEQ ID NO: 3935 - RNA, 23 nt, synthetic construct
  source 1..23: mol_type = other RNA
  modified_base 1: mod_base = OTHER; note = 2'-O-methyladenosine-3'- phosphorothioate
  modified_base 2: mod_base = OTHER; note = 2'-fluoroguanosine-3'-phosphorothioate
  modified_base 3: mod_base = OTHER; note = 2'-O-methyladenosine-3'-phosphate
  modified_base 4: mod_base = OTHER; note = 2'-O-methyladenosine-3'-phosphate
  modified_base 5: mod_base = OTHER; note = 2'-O-methyluridine-3'-phosphate
  modified_base 6: mod_base = OTHER; note = 2'-fluorocytidine-3'-phosphate
  modified_base 7: mod_base = OTHER; note = 2'-O-methylcytidine-3'-phosphate
  modified_base 8: mod_base = OTHER; note = 2'-fluorouridine-3'-phosphate
  modified_base 9: mod_base = OTHER; note = 2'-fluoroguanosine-3'-phosphate
  modified_base 10: mod_base = OTHER; note = 2'-O-methyluridine-3'-phosphate
  modified_base 11: mod_base = OTHER; note = 2'-O-methyluridine-3'-phosphate
  modified_base 12: mod_base = OTHER; note = 2'-O-methylguanosine-3'-phosphate
  modified_base 13: mod_base = OTHER; note = 2'-O-methyluridine-3'-phosphate
  modified_base 14: mod_base = OTHER; note = 2'-fluoroadenosine-3'-phosphate
  modified_base 15: mod_base = OTHER; note = 2'-O-methylguanosine-3'-phosphate
  modified_base 16: mod_base = OTHER; note = 2'-fluorocytidine-3'-phosphate
  modified_base 17: mod_base = OTHER; note = 2'-O-methylcytidine-3'-phosphate
  modified_base 18: mod_base = OTHER; note = 2'-O-methyluridine-3'-phosphate
  modified_base 19: mod_base = OTHER; note = 2'-O-methyladenosine-3'-phosphate
  modified_base 20: mod_base = OTHER; note = 2'-O-methylguanosine-3'-phosphate
  modified_base 21: mod_base = OTHER; note = 2'-O-methyladenosine-3'- phosphorothioate
  modified_base 22: mod_base = OTHER; note = 2'-O-methylcytidine-3'- phosphorothioate
  modified_base 23: mod_base = OTHER; note = 2'-O-methyladenosine-3'-phosphate
agaatcctgttgtagcctagaca

SEQ ID NO: 3936 - RNA, 23 nt, synthetic construct
  source 1..23: mol_type = other RNA
  modified_base 1: mod_base = OTHER; note = 2'-O-methyluridine-3'-phosphorothioate
  modified_base 2: mod_base = OTHER; note = 2'-fluoroadenosine-3'-phosphorothioate
  modified_base 3: mod_base = OTHER; note = 2'-O-methylcytidine-3'-phosphate
  modified_base 4: mod_base = OTHER; note = 2'-O-methyladenosine-3'-phosphate
  modified_base 5: mod_base = OTHER; note = 2'-O-methyladenosine-3'-phosphate
  modified_base 6: mod_base = OTHER; note = 2'-fluorocytidine-3'-phosphate
  modified_base 7: mod_base = OTHER; note = 2'-O-methyladenosine-3'-phosphate
  modified_base 8: mod_base = OTHER; note = 2'-fluorouridine-3'-phosphate
  modified_base 9: mod_base = OTHER; note = 2'-fluoroguanosine-3'-phosphate
  modified_base 10: mod_base = OTHER; note = 2'-O-methylcytidine-3'-phosphate
  modified_base 11: mod_base = OTHER; note = 2'-O-methyladenosine-3'-phosphate
  modified_base 12: mod_base = OTHER; note = 2'-O-methylcytidine-3'-phosphate
  modified_base 13: mod_base = OTHER; note = 2'-O-methyladenosine-3'-phosphate
  modified_base 14: mod_base = OTHER; note = 2'-fluoroadenosine-3'-phosphate
  modified_base 15: mod_base = OTHER; note = 2'-O-methylcytidine-3'-phosphate
  modified_base 16: mod_base = OTHER; note = 2'-fluorocytidine-3'-phosphate
  modified_base 17: mod_base = OTHER; note = 2'-O-methyluridine-3'-phosphate
  modified_base 18: mod_base = OTHER; note = 2'-O-methylcytidine-3'-phosphate
  modified_base 19: mod_base = OTHER; note = 2'-O-methylcytidine-3'-phosphate
  modified_base 20: mod_base = OTHER; note = 2'-O-methyladenosine-3'-phosphate
  modified_base 21: mod_base = OTHER; note = 2'-O-methylcytidine-3'- phosphorothioate
  modified_base 22: mod_base = OTHER; note = 2'-O-methylcytidine-3'- phosphorothioate
  modified_base 23: mod_base = OTHER; note = 2'-O-methyluridine-3'-phosphate
tacaacatgcacaacctccacct

SEQ ID NO: 3937 - RNA, 23 nt, synthetic construct
  source 1..23: mol_type = other RNA
  modified_base 1: mod_base = OTHER; note = 2'-O-methyluridine-3'-phosphorothioate
  modified_base 2: mod_base = OTHER; note = 2'-fluorocytidine-3'-phosphorothioate
  modified_base 3: mod_base = OTHER; note = 2'-O-methyluridine-3'-phosphate
  modified_base 4: mod_base = OTHER; note = 2'-O-methyluridine-3'-phosphate
  modified_base 5: mod_base = OTHER; note = 2'-O-methyluridine-3'-phosphate
  modified_base 6: mod_base = OTHER; note = 2'-fluoroguanosine-3'-phosphate
  modified_base 7: mod_base = OTHER; note = 2'-O-methyladenosine-3'-phosphate
  modified_base 8: mod_base = OTHER; note = 2'-fluoroguanosine-3'-phosphate
  modified_base 9: mod_base = OTHER; note = 2'-fluorouridine-3'-phosphate
  modified_base 10: mod_base = OTHER; note = 2'-O-methyluridine-3'-phosphate
  modified_base 11: mod_base = OTHER; note = 2'-O-methyluridine-3'-phosphate
  modified_base 12: mod_base = OTHER; note = 2'-O-methylguanosine-3'-phosphate
  modified_base 13: mod_base = OTHER; note = 2'-O-methyladenosine-3'-phosphate
  modified_base 14: mod_base = OTHER; note = 2'-fluorouridine-3'-phosphate
  modified_base 15: mod_base = OTHER; note = 2'-O-methylcytidine-3'-phosphate
  modified_base 16: mod_base = OTHER; note = 2'-fluoroadenosine-3'-phosphate
  modified_base 17: mod_base = OTHER; note = 2'-O-methylcytidine-3'-phosphate
  modified_base 18: mod_base = OTHER; note = 2'-O-methylcytidine-3'-phosphate
  modified_base 19: mod_base = OTHER; note = 2'-O-methyluridine-3'-phosphate
  modified_base 20: mod_base = OTHER; note = 2'-O-methylcytidine-3'-phosphate
  modified_base 21: mod_base = OTHER; note = 2'-O-methyladenosine-3'- phosphorothioate
  modified_base 22: mod_base = OTHER; note = 2'-O-methyluridine-3'-phosphorothioate
  modified_base 23: mod_base = OTHER; note = 2'-O-methyladenosine-3'-phosphate
tctttgagtttgatcacctcata

SEQ ID NO: 3938 - RNA, 23 nt, synthetic construct
  source 1..23: mol_type = other RNA
  modified_base 1: mod_base = OTHER; note = 2'-O-methyluridine-3'-phosphorothioate
  modified_base 2: mod_base = OTHER; note = 2'-fluorouridine -3'-phosphorothioate
  modified_base 3: mod_base = OTHER; note = 2'-O-methyladenosine-3'-phosphate
  modified_base 4: mod_base = OTHER; note = 2'-O-methylguanosine-3'-phosphate
  modified_base 5: mod_base = OTHER; note = 2'-O-methylcytidine-3'-phosphate
  modified_base 6: mod_base = OTHER; note = 2'-fluorocytidine-3'-phosphate
  modified_base 7: mod_base = OTHER; note = 2'-O-methyluridine-3'-phosphate
  modified_base 8: mod_base = OTHER; note = 2'-fluorouridine-3'-phosphate
  modified_base 9: mod_base = OTHER; note = 2'-fluorouridine-3'-phosphate
  modified_base 10: mod_base = OTHER; note = 2'-O-methylguanosine-3'-phosphate
  modified_base 11: mod_base = OTHER; note = 2'-O-methyladenosine-3'-phosphate
  modified_base 12: mod_base = OTHER; note = 2'-O-methylguanosine-3'-phosphate
  modified_base 13: mod_base = OTHER; note = 2'-O-methyluridine-3'-phosphate
  modified_base 14: mod_base = OTHER; note = 2'-fluorouridine-3'-phosphate
  modified_base 15: mod_base = OTHER; note = 2'-O-methyluridine-3'-phosphate
  modified_base 16: mod_base = OTHER; note = 2'-fluoroguanosine-3'-phosphate
  modified_base 17: mod_base = OTHER; note = 2'-O-methyladenosine-3'-phosphate
  modified_base 18: mod_base = OTHER; note = 2'-O-methyluridine-3'-phosphate
  modified_base 19: mod_base = OTHER; note = 2'-O-methylcytidine-3'-phosphate
  modified_base 20: mod_base = OTHER; note = 2'-O-methyladenosine-3'-phosphate
  modified_base 21: mod_base = OTHER; note = 2'-O-methylcytidine-3'- phosphorothioate
  modified_base 22: mod_base = OTHER; note = 2'-O-methylcytidine-3'- phosphorothioate
  modified_base 23: mod_base = OTHER; note = 2'-O-methyluridine-3'-phosphate
ttagcctttgagtttgatcacct

SEQ ID NO: 3939 - RNA, 23 nt, synthetic construct
  source 1..23: mol_type = other RNA
  modified_base 1: mod_base = OTHER; note = 2'-O-methyluridine-3'-phosphorothioate
  modified_base 2: mod_base = OTHER; note = 2'-fluorouridine -3'-phosphorothioate
  modified_base 3: mod_base = OTHER; note = 2'-O-methylcytidine-3'-phosphate
  modified_base 4: mod_base = OTHER; note = 2'-O-methyladenosine-3'-phosphate
  modified_base 5: mod_base = OTHER; note = 2'-O-methyladenosine-3'-phosphate
  modified_base 6: mod_base = OTHER; note = 2'-fluoroadenosine-3'-phosphate
  modified_base 7: mod_base = OTHER; note = 2'-O-methylcytidine-3'-phosphate
  modified_base 8: mod_base = OTHER; note = 2'-fluoroguanosine-3'-phosphate
  modified_base 9: mod_base = OTHER; note = 2'-fluoroguanosine-3'-phosphate
  modified_base 10: mod_base = OTHER; note = 2'-O-methylguanosine-3'-phosphate
  modified_base 11: mod_base = OTHER; note = 2'-O-methylcytidine-3'-phosphate
  modified_base 12: mod_base = OTHER; note = 2'-O-methylcytidine-3'-phosphate
  modified_base 13: mod_base = OTHER; note = 2'-O-methyluridine-3'-phosphate
  modified_base 14: mod_base = OTHER; note = 2'-fluorocytidine-3'-phosphate
  modified_base 15: mod_base = OTHER; note = 2'-O-methyluridine-3'-phosphate
  modified_base 16: mod_base = OTHER; note = 2'-fluorouridine-3'-phosphate
  modified_base 17: mod_base = OTHER; note = 2'-O-methylcytidine-3'-phosphate
  modified_base 18: mod_base = OTHER; note = 2'-O-methylcytidine-3'-phosphate
  modified_base 19: mod_base = OTHER; note = 2'-O-methyluridine-3'-phosphate
  modified_base 20: mod_base = OTHER; note = 2'-O-methylcytidine-3'-phosphate
  modified_base 21: mod_base = OTHER; note = 2'-O-methyladenosine-3'- phosphorothioate
  modified_base 22: mod_base = OTHER; note = 2'-O-methylguanosine-3'- phosphorothioate
  modified_base 23: mod_base = OTHER; note = 2'-O-methyladenosine-3'-phosphate
ttcaaacgggcctcttcctcaga

SEQ ID NO: 3940 - RNA, 23 nt, synthetic construct
  source 1..23: mol_type = other RNA
  modified_base 1: mod_base = OTHER; note = 2'-O-methyluridine-3'-phosphorothioate
  modified_base 2: mod_base = OTHER; note = 2'-fluoroadenosine-3'-phosphorothioate
  modified_base 3: mod_base = OTHER; note = 2'-O-methylcytidine-3'-phosphate
  modified_base 4: mod_base = OTHER; note = 2'-O-methyluridine-3'-phosphate
  modified_base 5: mod_base = OTHER; note = 2'-O-methylcytidine-3'-phosphate
  modified_base 6: mod_base = OTHER; note = 2'-fluorouridine-3'-phosphate
  modified_base 7: mod_base = OTHER; note = 2'-O-methylcytidine-3'-phosphate
  modified_base 8: mod_base = OTHER; note = 2'-fluoroadenosine-3'-phosphate
  modified_base 9: mod_base = OTHER; note = 2'-fluoroadenosine-3'-phosphate
  modified_base 10: mod_base = OTHER; note = 2'-O-methylcytidine-3'-phosphate
  modified_base 11: mod_base = OTHER; note = 2'-O-methylcytidine-3'-phosphate
  modified_base 12: mod_base = OTHER; note = 2'-O-methyladenosine-3'-phosphate
  modified_base 13: mod_base = OTHER; note = 2'-O-methylcytidine-3'-phosphate
  modified_base 14: mod_base = OTHER; note = 2'-fluorocytidine-3'-phosphate
  modified_base 15: mod_base = OTHER; note = 2'-O-methyluridine-3'-phosphate
  modified_base 16: mod_base = OTHER; note = 2'-fluoroguanosine-3'-phosphate
  modified_base 17: mod_base = OTHER; note = 2'-O-methylcytidine-3'-phosphate
  modified_base 18: mod_base = OTHER; note = 2'-O-methyluridine-3'-phosphate
  modified_base 19: mod_base = OTHER; note = 2'-O-methyluridine-3'-phosphate
  modified_base 20: mod_base = OTHER; note = 2'-O-methylguanosine-3'-phosphate
  modified_base 21: mod_base = OTHER; note = 2'-O-methyluridine-3'-phosphorothioate
  modified_base 22: mod_base = OTHER; note = 2'-O-methylguanosine-3'- phosphorothioate
  modified_base 23: mod_base = OTHER; note = 2'-O-methyladenosine-3'-phosphate
tactctcaaccacctgcttgtga

SEQ ID NO: 3941 - RNA, 23 nt, synthetic construct
  source 1..23: mol_type = other RNA
  modified_base 1: mod_base = OTHER; note = 2'-O-methyluridine-3'-phosphorothioate
  modified_base 2: mod_base = OTHER; note = 2'-fluorouridine -3'-phosphorothioate
  modified_base 3: mod_base = OTHER; note = 2'-O-methyladenosine-3'-phosphate
  modified_base 4: mod_base = OTHER; note = 2'-O-methyluridine-3'-phosphate
  modified_base 5: mod_base = OTHER; note = 2'-O-methyladenosine-3'-phosphate
  modified_base 6: mod_base = OTHER; note = 2'-fluorocytidine-3'-phosphate
  modified_base 7: mod_base = OTHER; note = 2'-O-methyluridine-3'-phosphate
  modified_base 8: mod_base = OTHER; note = 2'-fluorocytidine-3'-phosphate
  modified_base 9: mod_base = OTHER; note = 2'-fluorouridine-3'-phosphate
  modified_base 10: mod_base = OTHER; note = 2'-O-methylcytidine-3'-phosphate
  modified_base 11: mod_base = OTHER; note = 2'-O-methyluridine-3'-phosphate
  modified_base 12: mod_base = OTHER; note = 2'-O-methylguanosine-3'-phosphate
  modified_base 13: mod_base = OTHER; note = 2'-O-methylcytidine-3'-phosphate
  modified_base 14: mod_base = OTHER; note = 2'-fluorocytidine-3'-phosphate
  modified_base 15: mod_base = OTHER; note = 2'-O-methyladenosine-3'-phosphate
  modified_base 16: mod_base = OTHER; note = 2'-fluoroadenosine-3'-phosphate
  modified_base 17: mod_base = OTHER; note = 2'-O-methyladenosine-3'-phosphate
  modified_base 18: mod_base = OTHER; note = 2'-O-methyluridine-3'-phosphate
  modified_base 19: mod_base = OTHER; note = 2'-O-methylcytidine-3'-phosphate
  modified_base 20: mod_base = OTHER; note = 2'-O-methyluridine-3'-phosphate
  modified_base 21: mod_base = OTHER; note = 2'-O-methylguanosine-3'- phosphorothioate
  modified_base 22: mod_base = OTHER; note = 2'-O-methylcytidine-3'- phosphorothioate
  modified_base 23: mod_base = OTHER; note = 2'-O-methyluridine-3'-phosphate
ttatactctctgccaaatctgct

SEQ ID NO: 3942 - RNA, 23 nt, synthetic construct
  source 1..23: mol_type = other RNA
  modified_base 1: mod_base = OTHER; note = 2'-O-methylguanosine-3'- phosphorothioate
  modified_base 2: mod_base = OTHER; note = 2'-fluorouridine -3'-phosphorothioate
  modified_base 3: mod_base = OTHER; note = 2'-O-methyluridine-3'-phosphate
  modified_base 4: mod_base = OTHER; note = 2'-O-methyluridine-3'-phosphate
  modified_base 5: mod_base = OTHER; note = 2'-O-methylguanosine-3'-phosphate
  modified_base 6: mod_base = OTHER; note = 2'-fluoroadenosine-3'-phosphate
  modified_base 7: mod_base = OTHER; note = 2'-O-methyluridine-3'-phosphate
  modified_base 8: mod_base = OTHER; note = 2'-fluorocytidine-3'-phosphate
  modified_base 9: mod_base = OTHER; note = 2'-fluoroadenosine-3'-phosphate
  modified_base 10: mod_base = OTHER; note = 2'-O-methylcytidine-3'-phosphate
  modified_base 11: mod_base = OTHER; note = 2'-O-methylcytidine-3'-phosphate
  modified_base 12: mod_base = OTHER; note = 2'-O-methyluridine-3'-phosphate
  modified_base 13: mod_base = OTHER; note = 2'-O-methylcytidine-3'-phosphate
  modified_base 14: mod_base = OTHER; note = 2'-fluoroadenosine-3'-phosphate
  modified_base 15: mod_base = OTHER; note = 2'-O-methyluridine-3'-phosphate
  modified_base 16: mod_base = OTHER; note = 2'-fluoroadenosine-3'-phosphate
  modified_base 17: mod_base = OTHER; note = 2'-O-methyladenosine-3'-phosphate
  modified_base 18: mod_base = OTHER; note = 2'-O-methylguanosine-3'-phosphate
  modified_base 19: mod_base = OTHER; note = 2'-O-methylcytidine-3'-phosphate
  modified_base 20: mod_base = OTHER; note = 2'-O-methyladenosine-3'-phosphate
  modified_base 21: mod_base = OTHER; note = 2'-O-methylcytidine-3'- phosphorothioate
  modified_base 22: mod_base = OTHER; note = 2'-O-methyluridine-3'-phosphorothioate
  modified_base 23: mod_base = OTHER; note = 2'-O-methylcytidine-3'-phosphate
gtttgatcacctcataagcactc

SEQ ID NO: 3943 - RNA, 23 nt, synthetic construct
  source 1..23: mol_type = other RNA
  modified_base 1: mod_base = OTHER; note = 2'-O-methyladenosine-3'- phosphorothioate
  modified_base 2: mod_base = OTHER; note = 2'-fluorouridine -3'-phosphorothioate
  modified_base 3: mod_base = OTHER; note = 2'-O-methyladenosine-3'-phosphate
  modified_base 4: mod_base = OTHER; note = 2'-O-methylcytidine-3'-phosphate
  modified_base 5: mod_base = OTHER; note = 2'-O-methyluridine-3'-phosphate
  modified_base 6: mod_base = OTHER; note = 2'-fluorocytidine-3'-phosphate
  modified_base 7: mod_base = OTHER; note = 2'-O-methyluridine-3'-phosphate
  modified_base 8: mod_base = OTHER; note = 2'-fluorocytidine-3'-phosphate
  modified_base 9: mod_base = OTHER; note = 2'-fluorouridine-3'-phosphate
  modified_base 10: mod_base = OTHER; note = 2'-O-methylguanosine-3'-phosphate
  modified_base 11: mod_base = OTHER; note = 2'-O-methylcytidine-3'-phosphate
  modified_base 12: mod_base = OTHER; note = 2'-O-methylcytidine-3'-phosphate
  modified_base 13: mod_base = OTHER; note = 2'-O-methyladenosine-3'-phosphate
  modified_base 14: mod_base = OTHER; note = 2'-fluoroadenosine-3'-phosphate
  modified_base 15: mod_base = OTHER; note = 2'-O-methyladenosine-3'-phosphate
  modified_base 16: mod_base = OTHER; note = 2'-fluorouridine-3'-phosphate
  modified_base 17: mod_base = OTHER; note = 2'-O-methylcytidine-3'-phosphate
  modified_base 18: mod_base = OTHER; note = 2'-O-methyluridine-3'-phosphate
  modified_base 19: mod_base = OTHER; note = 2'-O-methylguanosine-3'-phosphate
  modified_base 20: mod_base = OTHER; note = 2'-O-methylcytidine-3'-phosphate
  modified_base 21: mod_base = OTHER; note = 2'-O-methyluridine-3'-phosphorothioate
  modified_base 22: mod_base = OTHER; note = 2'-O-methyladenosine-3'- phosphorothioate
  modified_base 23: mod_base = OTHER; note = 2'-O-methylcytidine-3'-phosphate
atactctctgccaaatctgctac

SEQ ID NO: 3944 - RNA, 23 nt, synthetic construct
  source 1..23: mol_type = other RNA
  modified_base 1: mod_base = OTHER; note = 2'-O-methyluridine-3'-phosphorothioate
  modified_base 2: mod_base = OTHER; note = 2'-fluorocytidine-3'-phosphorothioate
  modified_base 3: mod_base = OTHER; note = 2'-O-methyladenosine-3'-phosphate
  modified_base 4: mod_base = OTHER; note = 2'-O-methyluridine-3'-phosphate
  modified_base 5: mod_base = OTHER; note = 2'-O-methyluridine-3'-phosphate
  modified_base 6: mod_base = OTHER; note = 2'-fluoroadenosine-3'-phosphate
  modified_base 7: mod_base = OTHER; note = 2'-O-methyluridine-3'-phosphate
  modified_base 8: mod_base = OTHER; note = 2'-fluoroadenosine-3'-phosphate
  modified_base 9: mod_base = OTHER; note = 2'-fluorocytidine-3'-phosphate
  modified_base 10: mod_base = OTHER; note = 2'-O-methyluridine-3'-phosphate
  modified_base 11: mod_base = OTHER; note = 2'-O-methylcytidine-3'-phosphate
  modified_base 12: mod_base = OTHER; note = 2'-O-methyluridine-3'-phosphate
  modified_base 13: mod_base = OTHER; note = 2'-O-methylcytidine-3'-phosphate
  modified_base 14: mod_base = OTHER; note = 2'-fluorouridine-3'-phosphate
  modified_base 15: mod_base = OTHER; note = 2'-O-methylguanosine-3'-phosphate
  modified_base 16: mod_base = OTHER; note = 2'-fluorocytidine-3'-phosphate
  modified_base 17: mod_base = OTHER; note = 2'-O-methylcytidine-3'-phosphate
  modified_base 18: mod_base = OTHER; note = 2'-O-methyladenosine-3'-phosphate
  modified_base 19: mod_base = OTHER; note = 2'-O-methyladenosine-3'-phosphate
  modified_base 20: mod_base = OTHER; note = 2'-O-methyladenosine-3'-phosphate
  modified_base 21: mod_base = OTHER; note = 2'-O-methyluridine-3'-phosphorothioate
  modified_base 22: mod_base = OTHER; note = 2'-O-methylcytidine-3'- phosphorothioate
  modified_base 23: mod_base = OTHER; note = 2'-O-methyluridine-3'-phosphate
tcattatactctctgccaaatct

SEQ ID NO: 3945 - RNA, 23 nt, synthetic construct
  source 1..23: mol_type = other RNA
  modified_base 1: mod_base = OTHER; note = 2'-O-methyluridine-3'-phosphorothioate
  modified_base 2: mod_base = OTHER; note = 2'-fluorouridine -3'-phosphorothioate
  modified_base 3: mod_base = OTHER; note = 2'-O-methylcytidine-3'-phosphate
  modified_base 4: mod_base = OTHER; note = 2'-O-methyladenosine-3'-phosphate
  modified_base 5: mod_base = OTHER; note = 2'-O-methyluridine-3'-phosphate
  modified_base 6: mod_base = OTHER; note = 2'-fluorouridine-3'-phosphate
  modified_base 7: mod_base = OTHER; note = 2'-O-methyladenosine-3'-phosphate
  modified_base 8: mod_base = OTHER; note = 2'-fluorouridine-3'-phosphate
  modified_base 9: mod_base = OTHER; note = 2'-fluoroadenosine-3'-phosphate
  modified_base 10: mod_base = OTHER; note = 2'-O-methylcytidine-3'-phosphate
  modified_base 11: mod_base = OTHER; note = 2'-O-methyluridine-3'-phosphate
  modified_base 12: mod_base = OTHER; note = 2'-O-methylcytidine-3'-phosphate
  modified_base 13: mod_base = OTHER; note = 2'-O-methyluridine-3'-phosphate
  modified_base 14: mod_base = OTHER; note = 2'-fluorocytidine-3'-phosphate
  modified_base 15: mod_base = OTHER; note = 2'-O-methyluridine-3'-phosphate
  modified_base 16: mod_base = OTHER; note = 2'-fluoroguanosine-3'-phosphate
  modified_base 17: mod_base = OTHER; note = 2'-O-methylcytidine-3'-phosphate
  modified_base 18: mod_base = OTHER; note = 2'-O-methylcytidine-3'-phosphate
  modified_base 19: mod_base = OTHER; note = 2'-O-methyladenosine-3'-phosphate
  modified_base 20: mod_base = OTHER; note = 2'-O-methyladenosine-3'-phosphate
  modified_base 21: mod_base = OTHER; note = 2'-O-methyladenosine-3'- phosphorothioate
  modified_base 22: mod_base = OTHER; note = 2'-O-methyluridine-3'-phosphorothioate
  modified_base 23: mod_base = OTHER; note = 2'-O-methylcytidine-3'-phosphate
ttcattatactctctgccaaatc

SEQ ID NO: 3946 - RNA, 23 nt, synthetic construct
  source 1..23: mol_type = other RNA
  modified_base 1: mod_base = OTHER; note = 2'-O-methyluridine-3'-phosphorothioate
  modified_base 2: mod_base = OTHER; note = 2'-fluoroadenosine-3'-phosphorothioate
  modified_base 3: mod_base = OTHER; note = 2'-O-methyluridine-3'-phosphate
  modified_base 4: mod_base = OTHER; note = 2'-O-methyluridine-3'-phosphate
  modified_base 5: mod_base = OTHER; note = 2'-O-methylcytidine-3'-phosphate
  modified_base 6: mod_base = OTHER; note = 2'-fluorouridine-3'-phosphate
  modified_base 7: mod_base = OTHER; note = 2'-O-methylguanosine-3'-phosphate
  modified_base 8: mod_base = OTHER; note = 2'-fluorouridine-3'-phosphate
  modified_base 9: mod_base = OTHER; note = 2'-fluorocytidine-3'-phosphate
  modified_base 10: mod_base = OTHER; note = 2'-O-methylcytidine-3'-phosphate
  modified_base 11: mod_base = OTHER; note = 2'-O-methylcytidine-3'-phosphate
  modified_base 12: mod_base = OTHER; note = 2'-O-methyladenosine-3'-phosphate
  modified_base 13: mod_base = OTHER; note = 2'-O-methyladenosine-3'-phosphate
  modified_base 14: mod_base = OTHER; note = 2'-fluoroadenosine-3'-phosphate
  modified_base 15: mod_base = OTHER; note = 2'-O-methyladenosine-3'-phosphate
  modified_base 16: mod_base = OTHER; note = 2'-fluorouridine-3'-phosphate
  modified_base 17: mod_base = OTHER; note = 2'-O-methylguanosine-3'-phosphate
  modified_base 18: mod_base = OTHER; note = 2'-O-methylcytidine-3'-phosphate
  modified_base 19: mod_base = OTHER; note = 2'-O-methyladenosine-3'-phosphate
  modified_base 20: mod_base = OTHER; note = 2'-O-methyladenosine-3'-phosphate
  modified_base 21: mod_base = OTHER; note = 2'-O-methylguanosine-3'- phosphorothioate
  modified_base 22: mod_base = OTHER; note = 2'-O-methylguanosine-3'- phosphorothioate
  modified_base 23: mod_base = OTHER; note = 2'-O-methyladenosine-3'-phosphate
tattctgtcccaaaatgcaagga

SEQ ID NO: 3947 - RNA, 23 nt, synthetic construct
  source 1..23: mol_type = other RNA
  modified_base 1: mod_base = OTHER; note = 2'-O-methyluridine-3'-phosphorothioate
  modified_base 2: mod_base = OTHER; note = 2'-fluorocytidine-3'-phosphorothioate
  modified_base 3: mod_base = OTHER; note = 2'-O-methyladenosine-3'-phosphate
  modified_base 4: mod_base = OTHER; note = 2'-O-methylcytidine-3'-phosphate
  modified_base 5: mod_base = OTHER; note = 2'-O-methyladenosine-3'-phosphate
  modified_base 6: mod_base = OTHER; note = 2'-fluoroadenosine-3'-phosphate
  modified_base 7: mod_base = OTHER; note = 2'-O-methylguanosine-3'-phosphate
  modified_base 8: mod_base = OTHER; note = 2'-fluoroguanosine-3'-phosphate
  modified_base 9: mod_base = OTHER; note = 2'-fluorouridine-3'-phosphate
  modified_base 10: mod_base = OTHER; note = 2'-O-methylcytidine-3'-phosphate
  modified_base 11: mod_base = OTHER; note = 2'-O-methyluridine-3'-phosphate
  modified_base 12: mod_base = OTHER; note = 2'-O-methylguanosine-3'-phosphate
  modified_base 13: mod_base = OTHER; note = 2'-O-methyladenosine-3'-phosphate
  modified_base 14: mod_base = OTHER; note = 2'-fluoroguanosine-3'-phosphate
  modified_base 15: mod_base = OTHER; note = 2'-O-methyladenosine-3'-phosphate
  modified_base 16: mod_base = OTHER; note = 2'-fluorouridine-3'-phosphate
  modified_base 17: mod_base = OTHER; note = 2'-O-methyluridine-3'-phosphate
  modified_base 18: mod_base = OTHER; note = 2'-O-methylcytidine-3'-phosphate
  modified_base 19: mod_base = OTHER; note = 2'-O-methylcytidine-3'-phosphate
  modified_base 20: mod_base = OTHER; note = 2'-O-methyladenosine-3'-phosphate
  modified_base 21: mod_base = OTHER; note = 2'-O-methyluridine-3'-phosphorothioate
  modified_base 22: mod_base = OTHER; note = 2'-O-methyluridine-3'-phosphorothioate
  modified_base 23: mod_base = OTHER; note = 2'-O-methylcytidine-3'-phosphate
tcacaaggtctgagattccattc

SEQ ID NO: 3948 - RNA, 23 nt, synthetic construct
  source 1..23: mol_type = other RNA
  modified_base 1: mod_base = OTHER; note = 2'-O-methyluridine-3'-phosphorothioate
  modified_base 2: mod_base = OTHER; note = 2'-fluoroadenosine-3'-phosphorothioate
  modified_base 3: mod_base = OTHER; note = 2'-O-methylguanosine-3'-phosphate
  modified_base 4: mod_base = OTHER; note = 2'-O-methylcytidine-3'-phosphate
  modified_base 5: mod_base = OTHER; note = 2'-O-methyladenosine-3'-phosphate
  modified_base 6: mod_base = OTHER; note = 2'-fluorouridine-3'-phosphate
  modified_base 7: mod_base = OTHER; note = 2'-O-methylcytidine-3'-phosphate
  modified_base 8: mod_base = OTHER; note = 2'-fluoroadenosine-3'-phosphate
  modified_base 9: mod_base = OTHER; note = 2'-fluoroguanosine-3'-phosphate
  modified_base 10: mod_base = OTHER; note = 2'-O-methylguanosine-3'-phosphate
  modified_base 11: mod_base = OTHER; note = 2'-O-methyladenosine-3'-phosphate
  modified_base 12: mod_base = OTHER; note = 2'-O-methyluridine-3'-phosphate
  modified_base 13: mod_base = OTHER; note = 2'-O-methyladenosine-3'-phosphate
  modified_base 14: mod_base = OTHER; note = 2'-fluorouridine-3'-phosphate
  modified_base 15: mod_base = OTHER; note = 2'-O-methyladenosine-3'-phosphate
  modified_base 16: mod_base = OTHER; note = 2'-fluoroguanosine-3'-phosphate
  modified_base 17: mod_base = OTHER; note = 2'-O-methylcytidine-3'-phosphate
  modified_base 18: mod_base = OTHER; note = 2'-O-methyluridine-3'-phosphate
  modified_base 19: mod_base = OTHER; note = 2'-O-methylguanosine-3'-phosphate
  modified_base 20: mod_base = OTHER; note = 2'-O-methyluridine-3'-phosphate
  modified_base 21: mod_base = OTHER; note = 2'-O-methylguanosine-3'- phosphorothioate
  modified_base 22: mod_base = OTHER; note = 2'-O-methylguanosine-3'- phosphorothioate
  modified_base 23: mod_base = OTHER; note = 2'-O-methyladenosine-3'-phosphate
tagcatcaggatatagctgtgga

SEQ ID NO: 3949 - RNA, 23 nt, synthetic construct
  source 1..23: mol_type = other RNA
  modified_base 1: mod_base = OTHER; note = 2'-O-methyluridine-3'-phosphorothioate
  modified_base 2: mod_base = OTHER; note = 2'-fluorouridine -3'-phosphorothioate
  modified_base 3: mod_base = OTHER; note = 2'-O-methyluridine-3'-phosphate
  modified_base 4: mod_base = OTHER; note = 2'-O-methylcytidine-3'-phosphate
  modified_base 5: mod_base = OTHER; note = 2'-O-methyladenosine-3'-phosphate
  modified_base 6: mod_base = OTHER; note = 2'-fluoroadenosine-3'-phosphate
  modified_base 7: mod_base = OTHER; note = 2'-O-methyladenosine-3'-phosphate
  modified_base 8: mod_base = OTHER; note = 2'-fluorocytidine-3'-phosphate
  modified_base 9: mod_base = OTHER; note = 2'-fluoroguanosine-3'-phosphate
  modified_base 10: mod_base = OTHER; note = 2'-O-methylguanosine-3'-phosphate
  modified_base 11: mod_base = OTHER; note = 2'-O-methylguanosine-3'-phosphate
  modified_base 12: mod_base = OTHER; note = 2'-O-methylcytidine-3'-phosphate
  modified_base 13: mod_base = OTHER; note = 2'-O-methylcytidine-3'-phosphate
  modified_base 14: mod_base = OTHER; note = 2'-fluorouridine-3'-phosphate
  modified_base 15: mod_base = OTHER; note = 2'-O-methylcytidine-3'-phosphate
  modified_base 16: mod_base = OTHER; note = 2'-fluorouridine-3'-phosphate
  modified_base 17: mod_base = OTHER; note = 2'-O-methyluridine-3'-phosphate
  modified_base 18: mod_base = OTHER; note = 2'-O-methylcytidine-3'-phosphate
  modified_base 19: mod_base = OTHER; note = 2'-O-methylcytidine-3'-phosphate
  modified_base 20: mod_base = OTHER; note = 2'-O-methyluridine-3'-phosphate
  modified_base 21: mod_base = OTHER; note = 2'-O-methylcytidine-3'- phosphorothioate
  modified_base 22: mod_base = OTHER; note = 2'-O-methyladenosine-3'- phosphorothioate
  modified_base 23: mod_base = OTHER; note = 2'-O-methylguanosine-3'-phosphate
tttcaaacgggcctcttcctcag

SEQ ID NO: 3950 - RNA, 23 nt, synthetic construct
  source 1..23: mol_type = other RNA
  modified_base 1: mod_base = OTHER; note = 2'-O-methyluridine-3'-phosphorothioate
  modified_base 2: mod_base = OTHER; note = 2'-fluoroadenosine-3'-phosphorothioate
  modified_base 3: mod_base = OTHER; note = 2'-O-methyladenosine-3'-phosphate
  modified_base 4: mod_base = OTHER; note = 2'-O-methyladenosine-3'-phosphate
  modified_base 5: mod_base = OTHER; note = 2'-O-methylcytidine-3'-phosphate
  modified_base 6: mod_base = OTHER; note = 2'-fluoroguanosine-3'-phosphate
  modified_base 7: mod_base = OTHER; note = 2'-O-methylguanosine-3'-phosphate
  modified_base 8: mod_base = OTHER; note = 2'-fluoroguanosine-3'-phosphate
  modified_base 9: mod_base = OTHER; note = 2'-fluorocytidine-3'-phosphate
  modified_base 10: mod_base = OTHER; note = 2'-O-methylcytidine-3'-phosphate
  modified_base 11: mod_base = OTHER; note = 2'-O-methyluridine-3'-phosphate
  modified_base 12: mod_base = OTHER; note = 2'-O-methylcytidine-3'-phosphate
  modified_base 13: mod_base = OTHER; note = 2'-O-methyluridine-3'-phosphate
  modified_base 14: mod_base = OTHER; note = 2'-fluorouridine-3'-phosphate
  modified_base 15: mod_base = OTHER; note = 2'-O-methylcytidine-3'-phosphate
  modified_base 16: mod_base = OTHER; note = 2'-fluorocytidine-3'-phosphate
  modified_base 17: mod_base = OTHER; note = 2'-O-methyluridine-3'-phosphate
  modified_base 18: mod_base = OTHER; note = 2'-O-methylcytidine-3'-phosphate
  modified_base 19: mod_base = OTHER; note = 2'-O-methyladenosine-3'-phosphate
  modified_base 20: mod_base = OTHER; note = 2'-O-methylguanosine-3'-phosphate
  modified_base 21: mod_base = OTHER; note = 2'-O-methyladenosine-3'- phosphorothioate
  modified_base 22: mod_base = OTHER; note = 2'-O-methyladenosine-3'- phosphorothioate
  modified_base 23: mod_base = OTHER; note = 2'-O-methylguanosine-3'-phosphate
taaacgggcctcttcctcagaag

SEQ ID NO: 3951 - RNA, 23 nt, synthetic construct
  source 1..23: mol_type = other RNA
  modified_base 1: mod_base = OTHER; note = 2'-O-methyluridine-3'-phosphorothioate
  modified_base 2: mod_base = OTHER; note = 2'-fluoroadenosine-3'-phosphorothioate
  modified_base 3: mod_base = OTHER; note = 2'-O-methylcytidine-3'-phosphate
  modified_base 4: mod_base = OTHER; note = 2'-O-methyladenosine-3'-phosphate
  modified_base 5: mod_base = OTHER; note = 2'-O-methylcytidine-3'-phosphate
  modified_base 6: mod_base = OTHER; note = 2'-fluorouridine-3'-phosphate
  modified_base 7: mod_base = OTHER; note = 2'-O-methylguanosine-3'-phosphate
  modified_base 8: mod_base = OTHER; note = 2'-fluoroguanosine-3'-phosphate
  modified_base 9: mod_base = OTHER; note = 2'-fluoroadenosine-3'-phosphate
  modified_base 10: mod_base = OTHER; note = 2'-O-methyluridine-3'-phosphate
  modified_base 11: mod_base = OTHER; note = 2'-O-methylcytidine-3'-phosphate
  modified_base 12: mod_base = OTHER; note = 2'-O-methylcytidine-3'-phosphate
  modified_base 13: mod_base = OTHER; note = 2'-O-methylcytidine-3'-phosphate
  modified_base 14: mod_base = OTHER; note = 2'-fluoroadenosine-3'-phosphate
  modified_base 15: mod_base = OTHER; note = 2'-O-methylguanosine-3'-phosphate
  modified_base 16: mod_base = OTHER; note = 2'-fluoroguanosine-3'-phosphate
  modified_base 17: mod_base = OTHER; note = 2'-O-methyladenosine-3'-phosphate
  modified_base 18: mod_base = OTHER; note = 2'-O-methyluridine-3'-phosphate
  modified_base 19: mod_base = OTHER; note = 2'-O-methylguanosine-3'-phosphate
  modified_base 20: mod_base = OTHER; note = 2'-O-methyluridine-3'-phosphate
  modified_base 21: mod_base = OTHER; note = 2'-O-methylguanosine-3'- phosphorothioate
  modified_base 22: mod_base = OTHER; note = 2'-O-methyladenosine-3'- phosphorothioate
  modified_base 23: mod_base = OTHER; note = 2'-O-methylcytidine-3'-phosphate
tacactggatcccaggatgtgac

SEQ ID NO: 3952 - RNA, 23 nt, synthetic construct
  source 1..23: mol_type = other RNA
  modified_base 1: mod_base = OTHER; note = 2'-O-methyluridine-3'-phosphorothioate
  modified_base 2: mod_base = OTHER; note = 2'-fluoroguanosine-3'-phosphorothioate
  modified_base 3: mod_base = OTHER; note = 2'-O-methylguanosine-3'-phosphate
  modified_base 4: mod_base = OTHER; note = 2'-O-methyluridine-3'-phosphate
  modified_base 5: mod_base = OTHER; note = 2'-O-methylguanosine-3'-phosphate
  modified_base 6: mod_base = OTHER; note = 2'-fluorouridine-3'-phosphate
  modified_base 7: mod_base = OTHER; note = 2'-O-methyluridine-3'-phosphate
  modified_base 8: mod_base = OTHER; note = 2'-fluorocytidine-3'-phosphate
  modified_base 9: mod_base = OTHER; note = 2'-fluorouridine-3'-phosphate
  modified_base 10: mod_base = OTHER; note = 2'-O-methyladenosine-3'-phosphate
  modified_base 11: mod_base = OTHER; note = 2'-O-methyladenosine-3'-phosphate
  modified_base 12: mod_base = OTHER; note = 2'-O-methylguanosine-3'-phosphate
  modified_base 13: mod_base = OTHER; note = 2'-O-methylguanosine-3'-phosphate
  modified_base 14: mod_base = OTHER; note = 2'-fluoroadenosine-3'-phosphate
  modified_base 15: mod_base = OTHER; note = 2'-O-methyladenosine-3'-phosphate
  modified_base 16: mod_base = OTHER; note = 2'-fluoroadenosine-3'-phosphate
  modified_base 17: mod_base = OTHER; note = 2'-O-methyladenosine-3'-phosphate
  modified_base 18: mod_base = OTHER; note = 2'-O-methylguanosine-3'-phosphate
  modified_base 19: mod_base = OTHER; note = 2'-O-methylguanosine-3'-phosphate
  modified_base 20: mod_base = OTHER; note = 2'-O-methylcytidine-3'-phosphate
  modified_base 21: mod_base = OTHER; note = 2'-O-methyluridine-3'-phosphorothioate
  modified_base 22: mod_base = OTHER; note = 2'-O-methylguanosine-3'- phosphorothioate
  modified_base 23: mod_base = OTHER; note = 2'-O-methylcytidine-3'-phosphate
tggtgttctaaggaaaaggctgc

SEQ ID NO: 3953 - RNA, 23 nt, synthetic construct
  source 1..23: mol_type = other RNA
  modified_base 1: mod_base = OTHER; note = 2'-O-methyluridine-3'-phosphorothioate
  modified_base 2: mod_base = OTHER; note = 2'-fluoroadenosine-3'-phosphorothioate
  modified_base 3: mod_base = OTHER; note = 2'-O-methyluridine-3'-phosphate
  modified_base 4: mod_base = OTHER; note = 2'-O-methyluridine-3'-phosphate
  modified_base 5: mod_base = OTHER; note = 2'-O-methyluridine-3'-phosphate
  modified_base 6: mod_base = OTHER; note = 2'-fluorocytidine-3'-phosphate
  modified_base 7: mod_base = OTHER; note = 2'-O-methyladenosine-3'-phosphate
  modified_base 8: mod_base = OTHER; note = 2'-fluorocytidine-3'-phosphate
  modified_base 9: mod_base = OTHER; note = 2'-fluoroadenosine-3'-phosphate
  modified_base 10: mod_base = OTHER; note = 2'-O-methylcytidine-3'-phosphate
  modified_base 11: mod_base = OTHER; note = 2'-O-methyluridine-3'-phosphate
  modified_base 12: mod_base = OTHER; note = 2'-O-methyladenosine-3'-phosphate
  modified_base 13: mod_base = OTHER; note = 2'-O-methyladenosine-3'-phosphate
  modified_base 14: mod_base = OTHER; note = 2'-fluorocytidine-3'-phosphate
  modified_base 15: mod_base = OTHER; note = 2'-O-methylcytidine-3'-phosphate
  modified_base 16: mod_base = OTHER; note = 2'-fluoroadenosine-3'-phosphate
  modified_base 17: mod_base = OTHER; note = 2'-O-methylguanosine-3'-phosphate
  modified_base 18: mod_base = OTHER; note = 2'-O-methyluridine-3'-phosphate
  modified_base 19: mod_base = OTHER; note = 2'-O-methyluridine-3'-phosphate
  modified_base 20: mod_base = OTHER; note = 2'-O-methylguanosine-3'-phosphate
  modified_base 21: mod_base = OTHER; note = 2'-O-methyladenosine-3'- phosphorothioate
  modified_base 22: mod_base = OTHER; note = 2'-O-methyladenosine-3'- phosphorothioate
  modified_base 23: mod_base = OTHER; note = 2'-O-methylguanosine-3'-phosphate
tatttcacactaaccagttgaag

SEQ ID NO: 3954 - RNA, 23 nt, synthetic construct
  source 1..23: mol_type = other RNA
tttttatctgatctgtgattaaa

SEQ ID NO: 3955 - RNA, 23 nt, synthetic construct
  source 1..23: mol_type = other RNA
caactggttagtgtgaaatagtt

SEQ ID NO: 3956 - RNA, 23 nt, synthetic construct
  source 1..23: mol_type = other RNA
tgaacatgcctagtccaacattt

SEQ ID NO: 3957 - RNA, 23 nt, synthetic construct
  source 1..23: mol_type = other RNA
tccaagtccaatatggcaactct

SEQ ID NO: 3958 - RNA, 23 nt, synthetic construct
  source 1..23: mol_type = other RNA
tttccaccatgattaagggtctt

SEQ ID NO: 3959 - RNA, 23 nt, synthetic construct
  source 1..23: mol_type = other RNA
tatcatttcactgtctaggctac

SEQ ID NO: 3960 - RNA, 23 nt, synthetic construct
  source 1..23: mol_type = other RNA
gttgtcctttttatctgatctgt

SEQ ID NO: 3961 - RNA, 23 nt, synthetic construct
  source 1..23: mol_type = other RNA
atccagtgtataaatccaatatc

SEQ ID NO: 3962 - RNA, 23 nt, synthetic construct
  source 1..23: mol_type = other RNA
tatccaagtgttataccaactaa

SEQ ID NO: 3963 - RNA, 23 nt, synthetic construct
  source 1..23: mol_type = other RNA
atgtcatcgaagacaaattgaag

SEQ ID NO: 3964 - RNA, 23 nt, synthetic construct
  source 1..23: mol_type = other RNA
tagaacaccaaagattgtctctg

SEQ ID NO: 3965 - RNA, 23 nt, synthetic construct
  source 1..23: mol_type = other RNA
agaacaccaaagattgtctctgg

SEQ ID NO: 3966 - RNA, 23 nt, synthetic construct
  source 1..23: mol_type = other RNA
gcatgttgtcctttttatctgat

SEQ ID NO: 3967 - RNA, 23 nt, synthetic construct
  source 1..23: mol_type = other RNA
catcaactcctgaagttagaaat

SEQ ID NO: 3968 - RNA, 23 nt, synthetic construct
  source 1..23: mol_type = other RNA
ccaactatccaagtgttatacca

SEQ ID NO: 3969 - RNA, 23 nt, synthetic construct
  source 1..23: mol_type = other RNA
tttccttagaacaccaaagattg

SEQ ID NO: 3970 - RNA, 23 nt, synthetic construct
  source 1..23: mol_type = other RNA
atggtattaatcttgtgtagtct

SEQ ID NO: 3971 - RNA, 23 nt, synthetic construct
  source 1..23: mol_type = other RNA
ctggctccttcactgaacatgcc

SEQ ID NO: 3972 - RNA, 23 nt, synthetic construct
  source 1..23: mol_type = other RNA
tatatcagtagtgtacattacca

SEQ ID NO: 3973 - RNA, 23 nt, synthetic construct
  source 1..23: mol_type = other RNA
ggcagccttttccttagaacacc

SEQ ID NO: 3974 - RNA, 23 nt, synthetic construct
  source 1..23: mol_type = other RNA
aactggttagtgtgaaatagttc

SEQ ID NO: 3975 - RNA, 23 nt, synthetic construct
  source 1..23: mol_type = other RNA
gaactatatcagtagtgtacatt

SEQ ID NO: 3976 - RNA, 23 nt, synthetic construct
  source 1..23: mol_type = other RNA
actatatcagtagtgtacattac

SEQ ID NO: 3977 - RNA, 23 nt, synthetic construct
  source 1..23: mol_type = other RNA
cagtaatattttaagatggactg

SEQ ID NO: 3978 - RNA, 23 nt, synthetic construct
  source 1..23: mol_type = other RNA
tattttaagatggactgggaaaa

SEQ ID NO: 3979 - RNA, 23 nt, synthetic construct
  source 1..23: mol_type = other RNA
actggttagtgtgaaatagttct

SEQ ID NO: 3980 - RNA, 23 nt, synthetic construct
  source 1..23: mol_type = other RNA
ccttcactgaacatgcctagtcc

SEQ ID NO: 3981 - RNA, 23 nt, synthetic construct
  source 1..23: mol_type = other RNA
caaccaactatccaagtgttata

SEQ ID NO: 3982 - RNA, 23 nt, synthetic construct
  source 1..23: mol_type = other RNA
atccaagtgttataccaactaaa

SEQ ID NO: 3983 - RNA, 23 nt, synthetic construct
  source 1..23: mol_type = other RNA
gattccttttggttccaagtcca

SEQ ID NO: 3984 - RNA, 23 nt, synthetic construct
  source 1..23: mol_type = other RNA
tggcagccttttccttagaacac

SEQ ID NO: 3985 - RNA, 23 nt, synthetic construct
  source 1..23: mol_type = other RNA
gcagtaatattttaagatggact

SEQ ID NO: 3986 - RNA, 23 nt, synthetic construct
  source 1..23: mol_type = other RNA
gtaaaatccacagctatatcctg

SEQ ID NO: 3987 - RNA, 23 nt, synthetic construct
  source 1..23: mol_type = other RNA
gctccttcactgaacatgcctag

SEQ ID NO: 3988 - RNA, 23 nt, synthetic construct
  source 1..23: mol_type = other RNA
ttcactgaacatgcctagtccaa

SEQ ID NO: 3989 - RNA, 23 nt, synthetic construct
  source 1..23: mol_type = other RNA
ccaagtgttataccaactaaaac

SEQ ID NO: 3990 - RNA, 23 nt, synthetic construct
  source 1..23: mol_type = other RNA
gtttccaccatgattaagggtct

SEQ ID NO: 3991 - RNA, 23 nt, synthetic construct
  source 1..23: mol_type = other RNA
ctgaacatgcctagtccaacatt

SEQ ID NO: 3992 - RNA, 23 nt, synthetic construct
  source 1..23: mol_type = other RNA
atatcagtagtgtacattaccat

SEQ ID NO: 3993 - RNA, 23 nt, synthetic construct
  source 1..23: mol_type = other RNA
ctatccaagtgttataccaacta

SEQ ID NO: 3994 - RNA, 23 nt, synthetic construct
  source 1..23: mol_type = other RNA
ttccaagtccaatatggcaactc

SEQ ID NO: 3995 - RNA, 23 nt, synthetic construct
  source 1..23: mol_type = other RNA
gaatctcagaccttgtgaaggtg

SEQ ID NO: 3996 - RNA, 23 nt, synthetic construct
  source 1..23: mol_type = other RNA
atcatttcactgtctaggctaca

SEQ ID NO: 3997 - RNA, 23 nt, synthetic construct
  source 1..23: mol_type = other RNA
atccacagctatatcctgatgct

SEQ ID NO: 3998 - RNA, 23 nt, synthetic construct
  source 1..23: mol_type = other RNA
tccttcactgaacatgcctagtc

SEQ ID NO: 3999 - RNA, 23 nt, synthetic construct
  source 1..23: mol_type = other RNA
aggtggttgagagtgcttatgag

SEQ ID NO: 4000 - RNA, 23 nt, synthetic construct
  source 1..23: mol_type = other RNA
atcaaactcaaaggctacacatc

SEQ ID NO: 4001 - RNA, 23 nt, synthetic construct
  source 1..23: mol_type = other RNA
ctatatcagtagtgtacattacc

SEQ ID NO: 4002 - RNA, 23 nt, synthetic construct
  source 1..23: mol_type = other RNA
tgcaaccaactatccaagtgtta

SEQ ID NO: 4003 - RNA, 23 nt, synthetic construct
  source 1..23: mol_type = other RNA
tgtcatcgaagacaaattgaagg

SEQ ID NO: 4004 - RNA, 23 nt, synthetic construct
  source 1..23: mol_type = other RNA
tagcagatttggcagagagtata

SEQ ID NO: 4005 - RNA, 23 nt, synthetic construct
  source 1..23: mol_type = other RNA
ggctccttcactgaacatgccta

SEQ ID NO: 4006 - RNA, 23 nt, synthetic construct
  source 1..23: mol_type = other RNA
aacatgcctagtccaacattttt

SEQ ID NO: 4007 - RNA, 23 nt, synthetic construct
  source 1..23: mol_type = other RNA
tgtgccatcagtatcttaatgaa

SEQ ID NO: 4008 - RNA, 23 nt, synthetic construct
  source 1..23: mol_type = other RNA
gtgccatcagtatcttaatgaag

SEQ ID NO: 4009 - RNA, 23 nt, synthetic construct
  source 1..23: mol_type = other RNA
ccttagaacaccaaagattgtct

SEQ ID NO: 4010 - RNA, 23 nt, synthetic construct
  source 1..23: mol_type = other RNA
atatcatttcactgtctaggcta

SEQ ID NO: 4011 - RNA, 23 nt, synthetic construct
  source 1..23: mol_type = other RNA
tttcactgtctaggctacaacag

SEQ ID NO: 4012 - RNA, 23 nt, synthetic construct
  source 1..23: mol_type = other RNA
tgggatccagtgtataaatccaa

SEQ ID NO: 4013 - RNA, 23 nt, synthetic construct
  source 1..23: mol_type = other RNA
accaactatccaagtgttatacc

SEQ ID NO: 4014 - RNA, 23 nt, synthetic construct
  source 1..23: mol_type = other RNA
ttttggttccaagtccaatatgg

SEQ ID NO: 4015 - RNA, 23 nt, synthetic construct
  source 1..23: mol_type = other RNA
agtgcttatgaggtgatcaaact

SEQ ID NO: 4016 - RNA, 23 nt, synthetic construct
  source 1..23: mol_type = other RNA
tcaaactcaaaggctacacatcc

SEQ ID NO: 4017 - RNA, 23 nt, synthetic construct
  source 1..23: mol_type = other RNA
aatctcagaccttgtgaaggtga

SEQ ID NO: 4018 - RNA, 23 nt, synthetic construct
  source 1..23: mol_type = other RNA
tgtaaaatccacagctatatcct

SEQ ID NO: 4019 - RNA, 23 nt, synthetic construct
  source 1..23: mol_type = other RNA
ctccttcactgaacatgcctagt

SEQ ID NO: 4020 - RNA, 23 nt, synthetic construct
  source 1..23: mol_type = other RNA
ctgggatccagtgtataaatcca

SEQ ID NO: 4021 - RNA, 23 nt, synthetic construct
  source 1..23: mol_type = other RNA
cccaataaaccttgaacagtgac

SEQ ID NO: 4022 - RNA, 23 nt, synthetic construct
  source 1..23: mol_type = other RNA
atggcctgtgccatcagtatctt

SEQ ID NO: 4023 - RNA, 23 nt, synthetic construct
  source 1..23: mol_type = other RNA
tcttgttgatgtcatcgaagaca

SEQ ID NO: 4024 - RNA, 23 nt, synthetic construct
  source 1..23: mol_type = other RNA
aaggatcttattttgtgaactat

SEQ ID NO: 4025 - RNA, 23 nt, synthetic construct
  source 1..23: mol_type = other RNA
caaaggatcttattttgtgaact

SEQ ID NO: 4026 - RNA, 23 nt, synthetic construct
  source 1..23: mol_type = other RNA
atatcatgtcttgtgcataattc

SEQ ID NO: 4027 - RNA, 23 nt, synthetic construct
  source 1..23: mol_type = other RNA
gatgtcatatcatttcactgtct

SEQ ID NO: 4028 - RNA, 23 nt, synthetic construct
  source 1..23: mol_type = other RNA
tgtcatatcatttcactgtctag

SEQ ID NO: 4029 - RNA, 23 nt, synthetic construct
  source 1..23: mol_type = other RNA
tgatttataatcttctaaaggaa

SEQ ID NO: 4030 - RNA, 23 nt, synthetic construct
  source 1..23: mol_type = other RNA
aatggtttgtaaaatccacagct

SEQ ID NO: 4031 - RNA, 23 nt, synthetic construct
  source 1..23: mol_type = other RNA
tgatgctggatggtattaatctt

SEQ ID NO: 4032 - RNA, 23 nt, synthetic construct
  source 1..23: mol_type = other RNA
tgaactatatcagtagtgtacat

SEQ ID NO: 4033 - RNA, 23 nt, synthetic construct
  source 1..23: mol_type = other RNA
acatcaactcctgaagttagaaa

SEQ ID NO: 4034 - RNA, 23 nt, synthetic construct
  source 1..23: mol_type = other RNA
tgctggatggtattaatcttgtg

SEQ ID NO: 4035 - RNA, 23 nt, synthetic construct
  source 1..23: mol_type = other RNA
catatcatttcactgtctaggct

SEQ ID NO: 4036 - RNA, 23 nt, synthetic construct
  source 1..23: mol_type = other RNA
ttgtaaaatccacagctatatcc

SEQ ID NO: 4037 - RNA, 23 nt, synthetic construct
  source 1..23: mol_type = other RNA
cttccttagtgttccttgcattt

SEQ ID NO: 4038 - RNA, 23 nt, synthetic construct
  source 1..23: mol_type = other RNA
gtcatatcatttcactgtctagg

SEQ ID NO: 4039 - RNA, 23 nt, synthetic construct
  source 1..23: mol_type = other RNA
aaaacatcaactcctgaagttag

SEQ ID NO: 4040 - RNA, 23 nt, synthetic construct
  source 1..23: mol_type = other RNA
atcctgatgctggatggtattaa

SEQ ID NO: 4041 - RNA, 23 nt, synthetic construct
  source 1..23: mol_type = other RNA
acaatgcaaccaactatccaagt

SEQ ID NO: 4042 - RNA, 23 nt, synthetic construct
  source 1..23: mol_type = other RNA
tctttacggaataaaggatgatg

SEQ ID NO: 4043 - RNA, 23 nt, synthetic construct
  source 1..23: mol_type = other RNA
tcttccttagtgttccttgcatt

SEQ ID NO: 4044 - RNA, 23 nt, synthetic construct
  source 1..23: mol_type = other RNA
aacaatgcaaccaactatccaag

SEQ ID NO: 4045 - RNA, 23 nt, synthetic construct
  source 1..23: mol_type = other RNA
gcagatttggcagagagtataat

SEQ ID NO: 4046 - RNA, 23 nt, synthetic construct
  source 1..23: mol_type = other RNA
agtttccaccatgattaagggtc

SEQ ID NO: 4047 - RNA, 23 nt, synthetic construct
  source 1..23: mol_type = other RNA
caactggttagtgtgaaatagtt

SEQ ID NO: 4048 - RNA, 23 nt, synthetic construct
  source 1..23: mol_type = other RNA
tccaagtccaatatggcaactct

SEQ ID NO: 4049 - RNA, 23 nt, synthetic construct
  source 1..23: mol_type = other RNA
tttccaccatgattaagggtctt

SEQ ID NO: 4050 - RNA, 23 nt, synthetic construct
  source 1..23: mol_type = other RNA
tatcatttcactgtctaggctac

SEQ ID NO: 4051 - RNA, 23 nt, synthetic construct
  source 1..23: mol_type = other RNA
gttgtcctttttatctgatctgt

SEQ ID NO: 4052 - RNA, 23 nt, synthetic construct
  source 1..23: mol_type = other RNA
atccagtgtataaatccaatatc

SEQ ID NO: 4053 - RNA, 23 nt, synthetic construct
  source 1..23: mol_type = other RNA
tatccaagtgttataccaactaa

SEQ ID NO: 4054 - RNA, 23 nt, synthetic construct
  source 1..23: mol_type = other RNA
tagaacaccaaagattgtctctg

SEQ ID NO: 4055 - RNA, 23 nt, synthetic construct
  source 1..23: mol_type = other RNA
agaacaccaaagattgtctctgg

SEQ ID NO: 4056 - RNA, 23 nt, synthetic construct
  source 1..23: mol_type = other RNA
gcatgttgtcctttttatctgat

SEQ ID NO: 4057 - RNA, 23 nt, synthetic construct
  source 1..23: mol_type = other RNA
catcaactcctgaagttagaaat

SEQ ID NO: 4058 - RNA, 23 nt, synthetic construct
  source 1..23: mol_type = other RNA
ccaactatccaagtgttatacca

SEQ ID NO: 4059 - RNA, 23 nt, synthetic construct
  source 1..23: mol_type = other RNA
atggtattaatcttgtgtagtct

SEQ ID NO: 4060 - RNA, 23 nt, synthetic construct
  source 1..23: mol_type = other RNA
ctggctccttcactgaacatgcc

SEQ ID NO: 4061 - RNA, 23 nt, synthetic construct
  source 1..23: mol_type = other RNA
tatatcagtagtgtacattacca

SEQ ID NO: 4062 - RNA, 23 nt, synthetic construct
  source 1..23: mol_type = other RNA
ggcagccttttccttagaacacc

SEQ ID NO: 4063 - RNA, 23 nt, synthetic construct
  source 1..23: mol_type = other RNA
aactggttagtgtgaaatagttc

SEQ ID NO: 4064 - RNA, 23 nt, synthetic construct
  source 1..23: mol_type = other RNA
gaactatatcagtagtgtacatt

SEQ ID NO: 4065 - RNA, 23 nt, synthetic construct
  source 1..23: mol_type = other RNA
actatatcagtagtgtacattac

SEQ ID NO: 4066 - RNA, 23 nt, synthetic construct
  source 1..23: mol_type = other RNA
cagtaatattttaagatggactg

SEQ ID NO: 4067 - RNA, 23 nt, synthetic construct
  source 1..23: mol_type = other RNA
tattttaagatggactgggaaaa

SEQ ID NO: 4068 - RNA, 23 nt, synthetic construct
  source 1..23: mol_type = other RNA
ccttcactgaacatgcctagtcc

SEQ ID NO: 4069 - RNA, 23 nt, synthetic construct
  source 1..23: mol_type = other RNA
caaccaactatccaagtgttata

SEQ ID NO: 4070 - RNA, 23 nt, synthetic construct
  source 1..23: mol_type = other RNA
atccaagtgttataccaactaaa

SEQ ID NO: 4071 - RNA, 23 nt, synthetic construct
  source 1..23: mol_type = other RNA
gcagtaatattttaagatggact

SEQ ID NO: 4072 - RNA, 23 nt, synthetic construct
  source 1..23: mol_type = other RNA
gtaaaatccacagctatatcctg

SEQ ID NO: 4073 - RNA, 23 nt, synthetic construct
  source 1..23: mol_type = other RNA
gctccttcactgaacatgcctag

SEQ ID NO: 4074 - RNA, 23 nt, synthetic construct
  source 1..23: mol_type = other RNA
ttcactgaacatgcctagtccaa

SEQ ID NO: 4075 - RNA, 23 nt, synthetic construct
  source 1..23: mol_type = other RNA
ccaagtgttataccaactaaaac

SEQ ID NO: 4076 - RNA, 23 nt, synthetic construct
  source 1..23: mol_type = other RNA
gtttccaccatgattaagggtct

SEQ ID NO: 4077 - RNA, 23 nt, synthetic construct
  source 1..23: mol_type = other RNA
ctgaacatgcctagtccaacatt

SEQ ID NO: 4078 - RNA, 23 nt, synthetic construct
  source 1..23: mol_type = other RNA
atatcagtagtgtacattaccat

SEQ ID NO: 4079 - RNA, 23 nt, synthetic construct
  source 1..23: mol_type = other RNA
ctatccaagtgttataccaacta

SEQ ID NO: 4080 - RNA, 23 nt, synthetic construct
  source 1..23: mol_type = other RNA
ttccaagtccaatatggcaactc

SEQ ID NO: 4081 - RNA, 23 nt, synthetic construct
  source 1..23: mol_type = other RNA
atcatttcactgtctaggctaca

SEQ ID NO: 4082 - RNA, 23 nt, synthetic construct
  source 1..23: mol_type = other RNA
atccacagctatatcctgatgct

SEQ ID NO: 4083 - RNA, 23 nt, synthetic construct
  source 1..23: mol_type = other RNA
tccttcactgaacatgcctagtc

SEQ ID NO: 4084 - RNA, 23 nt, synthetic construct
  source 1..23: mol_type = other RNA
aggtggttgagagtgcttatgag

SEQ ID NO: 4085 - RNA, 23 nt, synthetic construct
  source 1..23: mol_type = other RNA
ctatatcagtagtgtacattacc

SEQ ID NO: 4086 - RNA, 23 nt, synthetic construct
  source 1..23: mol_type = other RNA
tgcaaccaactatccaagtgtta

SEQ ID NO: 4087 - RNA, 23 nt, synthetic construct
  source 1..23: mol_type = other RNA
tagcagatttggcagagagtata

SEQ ID NO: 4088 - RNA, 23 nt, synthetic construct
  source 1..23: mol_type = other RNA
ggctccttcactgaacatgccta

SEQ ID NO: 4089 - RNA, 23 nt, synthetic construct
  source 1..23: mol_type = other RNA
aacatgcctagtccaacattttt

SEQ ID NO: 4090 - RNA, 23 nt, synthetic construct
  source 1..23: mol_type = other RNA
tgtgccatcagtatcttaatgaa

SEQ ID NO: 4091 - RNA, 23 nt, synthetic construct
  source 1..23: mol_type = other RNA
gtgccatcagtatcttaatgaag

SEQ ID NO: 4092 - RNA, 23 nt, synthetic construct
  source 1..23: mol_type = other RNA
ccttagaacaccaaagattgtct

SEQ ID NO: 4093 - RNA, 23 nt, synthetic construct
  source 1..23: mol_type = other RNA
atatcatttcactgtctaggcta

SEQ ID NO: 4094 - RNA, 23 nt, synthetic construct
  source 1..23: mol_type = other RNA
tttcactgtctaggctacaacag

SEQ ID NO: 4095 - RNA, 23 nt, synthetic construct
  source 1..23: mol_type = other RNA
accaactatccaagtgttatacc

SEQ ID NO: 4096 - RNA, 23 nt, synthetic construct
  source 1..23: mol_type = other RNA
ttttggttccaagtccaatatgg

SEQ ID NO: 4097 - RNA, 23 nt, synthetic construct
  source 1..23: mol_type = other RNA
agtgcttatgaggtgatcaaact

SEQ ID NO: 4098 - RNA, 23 nt, synthetic construct
  source 1..23: mol_type = other RNA
aatctcagaccttgtgaaggtga

SEQ ID NO: 4099 - RNA, 23 nt, synthetic construct
  source 1..23: mol_type = other RNA
tgtaaaatccacagctatatcct

SEQ ID NO: 4100 - RNA, 23 nt, synthetic construct
  source 1..23: mol_type = other RNA
ctccttcactgaacatgcctagt

SEQ ID NO: 4101 - RNA, 23 nt, synthetic construct
  source 1..23: mol_type = other RNA
ctgggatccagtgtataaatcca

SEQ ID NO: 4102 - RNA, 23 nt, synthetic construct
  source 1..23: mol_type = other RNA
cccaataaaccttgaacagtgac

SEQ ID NO: 4103 - RNA, 23 nt, synthetic construct
  source 1..23: mol_type = other RNA
atggcctgtgccatcagtatctt

SEQ ID NO: 4104 - RNA, 23 nt, synthetic construct
  source 1..23: mol_type = other RNA
tcttgttgatgtcatcgaagaca

SEQ ID NO: 4105 - RNA, 23 nt, synthetic construct
  source 1..23: mol_type = other RNA
gcagatttggcagagagtataat

SEQ ID NO: 4106 - RNA, 23 nt, synthetic construct
  source 1..23: mol_type = other RNA
agtttccaccatgattaagggtc

SEQ ID NO: 4107 - RNA, 23 nt, synthetic construct
  source 1..23: mol_type = other RNA
gtctaggctacaacaggattcta

SEQ ID NO: 4108 - RNA, 23 nt, synthetic construct
  source 1..23: mol_type = other RNA
ggtggaggttgtgcatgttgtcc

SEQ ID NO: 4109 - RNA, 23 nt, synthetic construct
  source 1..23: mol_type = other RNA
tggctccttcactgaacatgcct

SEQ ID NO: 4110 - RNA, 23 nt, synthetic construct
  source 1..23: mol_type = other RNA
tccttttggttccaagtccaata

SEQ ID NO: 4111 - RNA, 23 nt, synthetic construct
  source 1..23: mol_type = other RNA
tggcctgtgccatcagtatctta

SEQ ID NO: 4112 - RNA, 23 nt, synthetic construct
  source 1..23: mol_type = other RNA
gtgcttatgaggtgatcaaactc

SEQ ID NO: 4113 - RNA, 23 nt, synthetic construct
  source 1..23: mol_type = other RNA
tgcttatgaggtgatcaaactca

SEQ ID NO: 4114 - RNA, 23 nt, synthetic construct
  source 1..23: mol_type = other RNA
ttccttgcattttgggacagaat

SEQ ID NO: 4115 - RNA, 23 nt, synthetic construct
  source 1..23: mol_type = other RNA
ttggttccaagtccaatatggca

SEQ ID NO: 4116 - RNA, 23 nt, synthetic construct
  source 1..23: mol_type = other RNA
ttcactgtctaggctacaacagg

SEQ ID NO: 4117 - RNA, 23 nt, synthetic construct
  source 1..23: mol_type = other RNA
tcactgtctaggctacaacagga

SEQ ID NO: 4118 - RNA, 23 nt, synthetic construct
  source 1..23: mol_type = other RNA
agaataagattacagttgttggg

SEQ ID NO: 4119 - RNA, 23 nt, synthetic construct
  source 1..23: mol_type = other RNA
tggttgagagtgcttatgaggtg

SEQ ID NO: 4120 - RNA, 23 nt, synthetic construct
  source 1..23: mol_type = other RNA
ctgtctaggctacaacaggattc

SEQ ID NO: 4121 - RNA, 23 nt, synthetic construct
  source 1..23: mol_type = other RNA
tgtctaggctacaacaggattct

SEQ ID NO: 4122 - RNA, 23 nt, synthetic construct
  source 1..23: mol_type = other RNA
aggtggaggttgtgcatgttgtc

SEQ ID NO: 4123 - RNA, 23 nt, synthetic construct
  source 1..23: mol_type = other RNA
tatgaggtgatcaaactcaaagg

SEQ ID NO: 4124 - RNA, 23 nt, synthetic construct
  source 1..23: mol_type = other RNA
aggtgatcaaactcaaaggctac

SEQ ID NO: 4125 - RNA, 23 nt, synthetic construct
  source 1..23: mol_type = other RNA
tctgaggaagaggcccgtttgaa

SEQ ID NO: 4126 - RNA, 23 nt, synthetic construct
  source 1..23: mol_type = other RNA
tcacaagcaggtggttgagagtg

SEQ ID NO: 4127 - RNA, 23 nt, synthetic construct
  source 1..23: mol_type = other RNA
agcagatttggcagagagtataa

SEQ ID NO: 4128 - RNA, 23 nt, synthetic construct
  source 1..23: mol_type = other RNA
gagtgcttatgaggtgatcaaac

SEQ ID NO: 4129 - RNA, 23 nt, synthetic construct
  source 1..23: mol_type = other RNA
gtagcagatttggcagagagtat

SEQ ID NO: 4130 - RNA, 23 nt, synthetic construct
  source 1..23: mol_type = other RNA
agatttggcagagagtataatga

SEQ ID NO: 4131 - RNA, 23 nt, synthetic construct
  source 1..23: mol_type = other RNA
gatttggcagagagtataatgaa

SEQ ID NO: 4132 - RNA, 23 nt, synthetic construct
  source 1..23: mol_type = other RNA
tccttgcattttgggacagaatg

SEQ ID NO: 4133 - RNA, 23 nt, synthetic construct
  source 1..23: mol_type = other RNA
gaatggaatctcagaccttgtga

SEQ ID NO: 4134 - RNA, 23 nt, synthetic construct
  source 1..23: mol_type = other RNA
tccacagctatatcctgatgctg

SEQ ID NO: 4135 - RNA, 23 nt, synthetic construct
  source 1..23: mol_type = other RNA
ctgaggaagaggcccgtttgaag

SEQ ID NO: 4136 - RNA, 23 nt, synthetic construct
  source 1..23: mol_type = other RNA
cttctgaggaagaggcccgtttg

SEQ ID NO: 4137 - RNA, 23 nt, synthetic construct
  source 1..23: mol_type = other RNA
gtcacatcctgggatccagtgta

SEQ ID NO: 4138 - RNA, 23 nt, synthetic construct
  source 1..23: mol_type = other RNA
gcagccttttccttagaacacca

SEQ ID NO: 4139 - RNA, 23 nt, synthetic construct
  source 1..23: mol_type = other RNA
cttcaactggttagtgtgaaata

SEQ ID NO: 4140 - RNA, 21 nt, synthetic construct
  source 1..21: mol_type = other RNA
  modified_base 1: mod_base = OTHER; note = 2'-fluoroguanosine-3'-phosphorothioate
  modified_base 2: mod_base = OTHER; note = 2'-O-methyladenosine-3'- phosphorothioate
  modified_base 3: mod_base = OTHER; note = 2'-fluoroadenosine-3'-phosphate
  modified_base 4: mod_base = OTHER; note = 2'-O-methyluridine-3'-phosphate
  modified_base 5: mod_base = OTHER; note = 2'-fluoroguanosine-3'-phosphate
  modified_base 6: mod_base = OTHER; note = 2'-O-methyluridine-3'-phosphate
  modified_base 7: mod_base = OTHER; note = 2'-fluoroguanosine-3'-phosphate
  modified_base 8: mod_base = OTHER; note = 2'-O-methyladenosine-3'-phosphate
  modified_base 9: mod_base = OTHER; note = 2'-fluoroadenosine-3'-phosphate
  modified_base 10: mod_base = OTHER; note = 2'-fluoroadenosine-3'-phosphate
  modified_base 11: mod_base = OTHER; note = 2'-fluoroguanosine-3'-phosphate
  modified_base 12: mod_base = OTHER; note = 2'-O-methyluridine-3'-phosphate
  modified_base 13: mod_base = OTHER; note = 2'-fluorocytidine-3'-phosphate
  modified_base 14: mod_base = OTHER; note = 2'-O-methyladenosine-3'-phosphate
  modified_base 15: mod_base = OTHER; note = 2'-fluorouridine-3'-phosphate
  modified_base 16: mod_base = OTHER; note = 2'-O-methylcytidine-3'-phosphate
  modified_base 17: mod_base = OTHER; note = 2'-fluoroguanosine-3'-phosphate
  modified_base 18: mod_base = OTHER; note = 2'-O-methyladenosine-3'-phosphate
  modified_base 19: mod_base = OTHER; note = 2'-fluorocytidine-3'-phosphate
  modified_base 20: mod_base = OTHER; note = 2'-O-methyladenosine-3'-phosphate
  modified_base 21: mod_base = OTHER; note 2'-fluoroadenosine-3'-phosphate-N-[tris(GalNAc-alkyl)-amido decanoyl)]-4-hydroxyprolinol (Hyp-(GalNAc-alkyl)3)
gaatgtgaaagtcatcgacaa

SEQ ID NO: 4141 - RNA, 21 nt, synthetic construct
  source 1..21: mol_type = other RNA
  modified_base 1: mod_base = OTHER; note = 2'-fluorouridine -3'-phosphorothioate
  modified_base 2: mod_base = OTHER; note = 2'-O-methyluridine-3'-phosphorothioate
  modified_base 3: mod_base = OTHER; note = 2'-fluorouridine-3'-phosphate
  modified_base 4: mod_base = OTHER; note = 2'-O-methyluridine-3'-phosphate
  modified_base 5: mod_base = OTHER; note = 2'-fluorocytidine-3'-phosphate
  modified_base 6: mod_base = OTHER; note = 2'-O-methyladenosine-3'-phosphate
  modified_base 7: mod_base = OTHER; note = 2'-fluoroadenosine-3'-phosphate
  modified_base 8: mod_base = OTHER; note = 2'-O-methyluridine-3'-phosphate
  modified_base 9: mod_base = OTHER; note = 2'-fluoroguanosine-3'-phosphate
  modified_base 10: mod_base = OTHER; note = 2'-fluoroguanosine-3'-phosphate
  modified_base 11: mod_base = OTHER; note = 2'-fluoroguanosine-3'-phosphate
  modified_base 12: mod_base = OTHER; note = 2'-O-methyluridine-3'-phosphate
  modified_base 13: mod_base = OTHER; note = 2'-fluoroguanosine-3'-phosphate
  modified_base 14: mod_base = OTHER; note = 2'-O-methyluridine-3'-phosphate
  modified_base 15: mod_base = OTHER; note = 2'-fluorocytidine-3'-phosphate
  modified_base 16: mod_base = OTHER; note = 2'-O-methylcytidine-3'-phosphate
  modified_base 17: mod_base = OTHER; note = 2'-fluorouridine-3'-phosphate
  modified_base 18: mod_base = OTHER; note = 2'-O-methyladenosine-3'-phosphate
  modified_base 19: mod_base = OTHER; note = 2'-fluoroguanosine-3'-phosphate
  modified_base 20: mod_base = OTHER; note = 2'-O-methylguanosine-3'-phosphate
  modified_base 21: mod_base = OTHER; note 2'-fluoroadenosine-3'-phosphate-N-[tris(GalNAc-alkyl)-amido decanoyl)]-4-hydroxyprolinol (Hyp-(GalNAc-alkyl)3)
ttttcaatgggtgtcctagga

SEQ ID NO: 4142 - RNA, 21 nt, synthetic construct
  source 1..21: mol_type = other RNA
  modified_base 1: mod_base = OTHER; note = 2'-fluoroguanosine-3'-phosphorothioate
  modified_base 2: mod_base = OTHER; note = 2'-O-methyladenosine-3'- phosphorothioate
  modified_base 3: mod_base = OTHER; note = 2'-fluoroadenosine-3'-phosphate
  modified_base 4: mod_base = OTHER; note = 2'-O-methyladenosine-3'-phosphate
  modified_base 5: mod_base = OTHER; note = 2'-fluoroguanosine-3'-phosphate
  modified_base 6: mod_base = OTHER; note = 2'-O-methyluridine-3'-phosphate
  modified_base 7: mod_base = OTHER; note = 2'-fluorocytidine-3'-phosphate
  modified_base 8: mod_base = OTHER; note = 2'-O-methyladenosine-3'-phosphate
  modified_base 9: mod_base = OTHER; note = 2'-fluorouridine-3'-phosphate
  modified_base 10: mod_base = OTHER; note = 2'-fluorocytidine-3'-phosphate
  modified_base 11: mod_base = OTHER; note = 2'-fluoroguanosine-3'-phosphate
  modified_base 12: mod_base = OTHER; note = 2'-O-methyladenosine-3'-phosphate
  modified_base 13: mod_base = OTHER; note = 2'-fluorocytidine-3'-phosphate
  modified_base 14: mod_base = OTHER; note = 2'-O-methyladenosine-3'-phosphate
  modified_base 15: mod_base = OTHER; note = 2'-fluoroadenosine-3'-phosphate
  modified_base 16: mod_base = OTHER; note = 2'-O-methylguanosine-3'-phosphate
  modified_base 17: mod_base = OTHER; note = 2'-fluoroadenosine-3'-phosphate
  modified_base 18: mod_base = OTHER; note = 2'-O-methylcytidine-3'-phosphate
  modified_base 19: mod_base = OTHER; note = 2'-fluoroadenosine-3'-phosphate
  modified_base 20: mod_base = OTHER; note = 2'-O-methyluridine-3'-phosphate
  modified_base 21: mod_base = OTHER; note 2'-fluorouridine-3'-phosphate-N-[tris(GalNAc-alkyl)-amidode canoyl)]-4-hydroxyprolinol (Hyp-(GalNAc-alkyl)3)
gaaagtcatcgacaagacatt

SEQ ID NO: 4143 - RNA, 21 nt, synthetic construct
  source 1..21: mol_type = other RNA
  modified_base 1: mod_base = OTHER; note = 2'-fluorouridine -3'-phosphorothioate
  modified_base 2: mod_base = OTHER; note = 2'-O-methylcytidine-3'- phosphorothioate
  modified_base 3: mod_base = OTHER; note = 2'-fluoroadenosine-3'-phosphate
  modified_base 4: mod_base = OTHER; note = 2'-O-methyluridine-3'-phosphate
  modified_base 5: mod_base = OTHER; note = 2'-fluorocytidine-3'-phosphate
  modified_base 6: mod_base = OTHER; note = 2'-O-methylguanosine-3'-phosphate
  modified_base 7: mod_base = OTHER; note = 2'-fluoroadenosine-3'-phosphate
  modified_base 8: mod_base = OTHER; note = 2'-O-methylcytidine-3'-phosphate
  modified_base 9: mod_base = OTHER; note = 2'-fluoroadenosine-3'-phosphate
  modified_base 10: mod_base = OTHER; note = 2'-fluoroadenosine-3'-phosphate
  modified_base 11: mod_base = OTHER; note = 2'-fluoroguanosine-3'-phosphate
  modified_base 12: mod_base = OTHER; note = 2'-O-methyladenosine-3'-phosphate
  modified_base 13: mod_base = OTHER; note = 2'-fluorocytidine-3'-phosphate
  modified_base 14: mod_base = OTHER; note = 2'-O-methyladenosine-3'-phosphate
  modified_base 15: mod_base = OTHER; note = 2'-fluorouridine-3'-phosphate
  modified_base 16: mod_base = OTHER; note = 2'-O-methyluridine-3'-phosphate
  modified_base 17: mod_base = OTHER; note = 2'-fluoroguanosine-3'-phosphate
  modified_base 18: mod_base = OTHER; note = 2'-O-methylguanosine-3'-phosphate
  modified_base 19: mod_base = OTHER; note = 2'-fluorouridine-3'-phosphate
  modified_base 20: mod_base = OTHER; note = 2'-O-methylguanosine-3'-phosphate
  modified_base 21: mod_base = OTHER; note 2'-fluoroadenosine-3'-phosphate-N-[tris(GalNAc-alkyl)-amido decanoyl)]-4-hydroxyprolinol (Hyp-(GalNAc-alkyl)3)
tcatcgacaagacattggtga

SEQ ID NO: 4144 - RNA, 21 nt, synthetic construct
  source 1..21: mol_type = other RNA
  modified_base 1: mod_base = OTHER; note = 2'-fluorouridine -3'-phosphorothioate
  modified_base 2: mod_base = OTHER; note = 2'-O-methyluridine-3'-phosphorothioate
  modified_base 3: mod_base = OTHER; note = 2'-fluorouridine-3'-phosphate
  modified_base 4: mod_base = OTHER; note = 2'-O-methylcytidine-3'-phosphate
  modified_base 5: mod_base = OTHER; note = 2'-fluoroadenosine-3'-phosphate
  modified_base 6: mod_base = OTHER; note = 2'-O-methyladenosine-3'-phosphate
  modified_base 7: mod_base = OTHER; note = 2'-fluorouridine-3'-phosphate
  modified_base 8: mod_base = OTHER; note = 2'-O-methylguanosine-3'-phosphate
  modified_base 9: mod_base = OTHER; note = 2'-fluoroguanosine-3'-phosphate
  modified_base 10: mod_base = OTHER; note = 2'-fluoroguanosine-3'-phosphate
  modified_base 11: mod_base = OTHER; note = 2'-fluorouridine-3'-phosphate
  modified_base 12: mod_base = OTHER; note = 2'-O-methylguanosine-3'-phosphate
  modified_base 13: mod_base = OTHER; note = 2'-fluorouridine-3'-phosphate
  modified_base 14: mod_base = OTHER; note = 2'-O-methylcytidine-3'-phosphate
  modified_base 15: mod_base = OTHER; note = 2'-fluorocytidine-3'-phosphate
  modified_base 16: mod_base = OTHER; note = 2'-O-methyluridine-3'-phosphate
  modified_base 17: mod_base = OTHER; note = 2'-fluoroadenosine-3'-phosphate
  modified_base 18: mod_base = OTHER; note = 2'-O-methylguanosine-3'-phosphate
  modified_base 19: mod_base = OTHER; note = 2'-fluoroguanosine-3'-phosphate
  modified_base 20: mod_base = OTHER; note = 2'-O-methyladenosine-3'-phosphate
  modified_base 21: mod_base = OTHER; note 2'-fluoroadenosine-3'-phosphate-N-[tris(GalNAc-alkyl)-amido decanoyl)]-4-hydroxyprolinol (Hyp-(GalNAc-alkyl)3)
tttcaatgggtgtcctaggaa

SEQ ID NO: 4145 - RNA, 21 nt, synthetic construct
  source 1..21: mol_type = other RNA
  modified_base 1: mod_base = OTHER; note = 2'-fluoroadenosine-3'-phosphorothioate
  modified_base 2: mod_base = OTHER; note = 2'-O-methyladenosine-3'- phosphorothioate
  modified_base 3: mod_base = OTHER; note = 2'-fluorouridine-3'-phosphate
  modified_base 4: mod_base = OTHER; note = 2'-O-methylguanosine-3'-phosphate
  modified_base 5: mod_base = OTHER; note = 2'-fluoroguanosine-3'-phosphate
  modified_base 6: mod_base = OTHER; note = 2'-O-methylguanosine-3'-phosphate
  modified_base 7: mod_base = OTHER; note = 2'-fluorouridine-3'-phosphate
  modified_base 8: mod_base = OTHER; note = 2'-O-methylguanosine-3'-phosphate
  modified_base 9: mod_base = OTHER; note = 2'-fluorouridine-3'-phosphate
  modified_base 10: mod_base = OTHER; note = 2'-fluorocytidine-3'-phosphate
  modified_base 11: mod_base = OTHER; note = 2'-fluorocytidine-3'-phosphate
  modified_base 12: mod_base = OTHER; note = 2'-O-methyluridine-3'-phosphate
  modified_base 13: mod_base = OTHER; note = 2'-fluoroadenosine-3'-phosphate
  modified_base 14: mod_base = OTHER; note = 2'-O-methylguanosine-3'-phosphate
  modified_base 15: mod_base = OTHER; note = 2'-fluoroguanosine-3'-phosphate
  modified_base 16: mod_base = OTHER; note = 2'-O-methyladenosine-3'-phosphate
  modified_base 17: mod_base = OTHER; note = 2'-fluoroadenosine-3'-phosphate
  modified_base 18: mod_base = OTHER; note = 2'-O-methylcytidine-3'-phosphate
  modified_base 19: mod_base = OTHER; note = 2'-fluorocytidine-3'-phosphate
  modified_base 20: mod_base = OTHER; note = 2'-O-methyluridine-3'-phosphate
  modified_base 21: mod_base = OTHER; note 2'-fluorouridine-3'-phosphate-N-[tris(GalNAc-alkyl)-amidode canoyl)]-4-hydroxyprolinol (Hyp-(GalNAc-alkyl)3)
aatgggtgtcctaggaacctt

SEQ ID NO: 4146 - RNA, 21 nt, synthetic construct
  source 1..21: mol_type = other RNA
  modified_base 1: mod_base = OTHER; note = 2'-fluoroguanosine-3'-phosphorothioate
  modified_base 2: mod_base = OTHER; note = 2'-O-methyladenosine-3'- phosphorothioate
  modified_base 3: mod_base = OTHER; note = 2'-fluorocytidine-3'-phosphate
  modified_base 4: mod_base = OTHER; note = 2'-O-methyladenosine-3'-phosphate
  modified_base 5: mod_base = OTHER; note = 2'-fluoroguanosine-3'-phosphate
  modified_base 6: mod_base = OTHER; note = 2'-O-methyluridine-3'-phosphate
  modified_base 7: mod_base = OTHER; note = 2'-fluoroguanosine-3'-phosphate
  modified_base 8: mod_base = OTHER; note = 2'-O-methylcytidine-3'-phosphate
  modified_base 9: mod_base = OTHER; note = 2'-fluoroadenosine-3'-phosphate
  modified_base 10: mod_base = OTHER; note = 2'-fluorocytidine-3'-phosphate
  modified_base 11: mod_base = OTHER; note = 2'-fluoroadenosine-3'-phosphate
  modified_base 12: mod_base = OTHER; note = 2'-O-methyladenosine-3'-phosphate
  modified_base 13: mod_base = OTHER; note = 2'-fluorouridine-3'-phosphate
  modified_base 14: mod_base = OTHER; note = 2'-O-methyladenosine-3'-phosphate
  modified_base 15: mod_base = OTHER; note = 2'-fluorouridine-3'-phosphate
  modified_base 16: mod_base = OTHER; note = 2'-O-methyluridine-3'-phosphate
  modified_base 17: mod_base = OTHER; note = 2'-fluorouridine-3'-phosphate
  modified_base 18: mod_base = OTHER; note = 2'-O-methyluridine-3'-phosphate
  modified_base 19: mod_base = OTHER; note = 2'-fluorocytidine-3'-phosphate
  modified_base 20: mod_base = OTHER; note = 2'-O-methylcytidine-3'-phosphate
  modified_base 21: mod_base = OTHER; note 2'-fluoroadenosine-3'-phosphate-N-[tris(GalNAc-alkyl)-amido decanoyl)]-4-hydroxyprolinol (Hyp-(GalNAc-alkyl)3)
gacagtgcacaatattttcca

SEQ ID NO: 4147 - RNA, 21 nt, synthetic construct
  source 1..21: mol_type = other RNA
  modified_base 1: mod_base = OTHER; note = 2'-fluoroadenosine-3'-phosphorothioate
  modified_base 2: mod_base = OTHER; note = 2'-O-methylcytidine-3'- phosphorothioate
  modified_base 3: mod_base = OTHER; note = 2'-fluorouridine-3'-phosphate
  modified_base 4: mod_base = OTHER; note = 2'-O-methyluridine-3'-phosphate
  modified_base 5: mod_base = OTHER; note = 2'-fluorouridine-3'-phosphate
  modified_base 6: mod_base = OTHER; note = 2'-O-methyluridine-3'-phosphate
  modified_base 7: mod_base = OTHER; note = 2'-fluorocytidine-3'-phosphate
  modified_base 8: mod_base = OTHER; note = 2'-O-methyladenosine-3'-phosphate
  modified_base 9: mod_base = OTHER; note = 2'-fluoroadenosine-3'-phosphate
  modified_base 10: mod_base = OTHER; note = 2'-fluorouridine-3'-phosphate
  modified_base 11: mod_base = OTHER; note = 2'-fluoroguanosine-3'-phosphate
  modified_base 12: mod_base = OTHER; note = 2'-O-methylguanosine-3'-phosphate
  modified_base 13: mod_base = OTHER; note = 2'-fluoroguanosine-3'-phosphate
  modified_base 14: mod_base = OTHER; note = 2'-O-methyluridine-3'-phosphate
  modified_base 15: mod_base = OTHER; note = 2'-fluoroguanosine-3'-phosphate
  modified_base 16: mod_base = OTHER; note = 2'-O-methyluridine-3'-phosphate
  modified_base 17: mod_base = OTHER; note = 2'-fluorocytidine-3'-phosphate
  modified_base 18: mod_base = OTHER; note = 2'-O-methylcytidine-3'-phosphate
  modified_base 19: mod_base = OTHER; note = 2'-fluorouridine-3'-phosphate
  modified_base 20: mod_base = OTHER; note = 2'-O-methyladenosine-3'-phosphate
  modified_base 21: mod_base = OTHER; note 2'-fluoroadenosine-3'-phosphate-N-[tris(GalNAc-alkyl)-amido decanoyl)]-4-hydroxyprolinol (Hyp-(GalNAc-alkyl)3)
acttttcaatgggtgtcctaa

SEQ ID NO: 4148 - RNA, 21 nt, synthetic construct
  source 1..21: mol_type = other RNA
  modified_base 1: mod_base = OTHER; note = 2'-fluoroadenosine-3'-phosphorothioate
  modified_base 2: mod_base = OTHER; note = 2'-O-methyladenosine-3'- phosphorothioate
  modified_base 3: mod_base = OTHER; note = 2'-fluoroguanosine-3'-phosphate
  modified_base 4: mod_base = OTHER; note = 2'-O-methyluridine-3'-phosphate
  modified_base 5: mod_base = OTHER; note = 2'-fluorocytidine-3'-phosphate
  modified_base 6: mod_base = OTHER; note = 2'-O-methyladenosine-3'-phosphate
  modified_base 7: mod_base = OTHER; note = 2'-fluorouridine-3'-phosphate
  modified_base 8: mod_base = OTHER; note = 2'-O-methylcytidine-3'-phosphate
  modified_base 9: mod_base = OTHER; note = 2'-fluoroguanosine-3'-phosphate
  modified_base 10: mod_base = OTHER; note = 2'-fluoroadenosine-3'-phosphate
  modified_base 11: mod_base = OTHER; note = 2'-fluorocytidine-3'-phosphate
  modified_base 12: mod_base = OTHER; note = 2'-O-methyladenosine-3'-phosphate
  modified_base 13: mod_base = OTHER; note = 2'-fluoroadenosine-3'-phosphate
  modified_base 14: mod_base = OTHER; note = 2'-O-methylguanosine-3'-phosphate
  modified_base 15: mod_base = OTHER; note = 2'-fluoroadenosine-3'-phosphate
  modified_base 16: mod_base = OTHER; note = 2'-O-methylcytidine-3'-phosphate
  modified_base 17: mod_base = OTHER; note = 2'-fluoroadenosine-3'-phosphate
  modified_base 18: mod_base = OTHER; note = 2'-O-methyluridine-3'-phosphate
  modified_base 19: mod_base = OTHER; note = 2'-fluorouridine-3'-phosphate
  modified_base 20: mod_base = OTHER; note = 2'-O-methylguanosine-3'-phosphate
  modified_base 21: mod_base = OTHER; note 2'-fluoroadenosine-3'-phosphate-N-[tris(GalNAc-alkyl)-amido decanoyl)]-4-hydroxyprolinol (Hyp-(GalNAc-alkyl)3)
aagtcatcgacaagacattga

SEQ ID NO: 4149 - RNA, 21 nt, synthetic construct
  source 1..21: mol_type = other RNA
  modified_base 1: mod_base = OTHER; note = 2'-fluoroadenosine-3'-phosphorothioate
  modified_base 2: mod_base = OTHER; note = 2'-O-methyluridine-3'-phosphorothioate
  modified_base 3: mod_base = OTHER; note = 2'-fluorocytidine-3'-phosphate
  modified_base 4: mod_base = OTHER; note = 2'-O-methylguanosine-3'-phosphate
  modified_base 5: mod_base = OTHER; note = 2'-fluoroadenosine-3'-phosphate
  modified_base 6: mod_base = OTHER; note = 2'-O-methylcytidine-3'-phosphate
  modified_base 7: mod_base = OTHER; note = 2'-fluoroadenosine-3'-phosphate
  modified_base 8: mod_base = OTHER; note = 2'-O-methyladenosine-3'-phosphate
  modified_base 9: mod_base = OTHER; note = 2'-fluoroguanosine-3'-phosphate
  modified_base 10: mod_base = OTHER; note = 2'-fluoroadenosine-3'-phosphate
  modified_base 11: mod_base = OTHER; note = 2'-fluorocytidine-3'-phosphate
  modified_base 12: mod_base = OTHER; note = 2'-O-methyladenosine-3'-phosphate
  modified_base 13: mod_base = OTHER; note = 2'-fluorouridine-3'-phosphate
  modified_base 14: mod_base = OTHER; note = 2'-O-methyluridine-3'-phosphate
  modified_base 15: mod_base = OTHER; note = 2'-fluoroguanosine-3'-phosphate
  modified_base 16: mod_base = OTHER; note = 2'-O-methylguanosine-3'-phosphate
  modified_base 17: mod_base = OTHER; note = 2'-fluorouridine-3'-phosphate
  modified_base 18: mod_base = OTHER; note = 2'-O-methylguanosine-3'-phosphate
  modified_base 19: mod_base = OTHER; note = 2'-fluoroadenosine-3'-phosphate
  modified_base 20: mod_base = OTHER; note = 2'-O-methylguanosine-3'-phosphate
  modified_base 21: mod_base = OTHER; note 2'-fluoroadenosine-3'-phosphate-N-[tris(GalNAc-alkyl)-amido decanoyl)]-4-hydroxyprolinol (Hyp-(GalNAc-alkyl)3)
atcgacaagacattggtgaga

SEQ ID NO: 4150 - RNA, 21 nt, synthetic construct
  source 1..21: mol_type = other RNA
  modified_base 1: mod_base = OTHER; note = 2'-fluoroguanosine-3'-phosphorothioate
  modified_base 2: mod_base = OTHER; note = 2'-O-methylguanosine-3'- phosphorothioate
  modified_base 3: mod_base = OTHER; note = 2'-fluoroguanosine-3'-phosphate
  modified_base 4: mod_base = OTHER; note = 2'-O-methyladenosine-3'-phosphate
  modified_base 5: mod_base = OTHER; note = 2'-fluoroguanosine-3'-phosphate
  modified_base 6: mod_base = OTHER; note = 2'-O-methyladenosine-3'-phosphate
  modified_base 7: mod_base = OTHER; note = 2'-fluoroadenosine-3'-phosphate
  modified_base 8: mod_base = OTHER; note = 2'-O-methyladenosine-3'-phosphate
  modified_base 9: mod_base = OTHER; note = 2'-fluoroguanosine-3'-phosphate
  modified_base 10: mod_base = OTHER; note = 2'-fluoroguanosine-3'-phosphate
  modified_base 11: mod_base = OTHER; note = 2'-fluorouridine-3'-phosphate
  modified_base 12: mod_base = OTHER; note = 2'-O-methylguanosine-3'-phosphate
  modified_base 13: mod_base = OTHER; note = 2'-fluorouridine-3'-phosphate
  modified_base 14: mod_base = OTHER; note = 2'-O-methyluridine-3'-phosphate
  modified_base 15: mod_base = OTHER; note = 2'-fluorocytidine-3'-phosphate
  modified_base 16: mod_base = OTHER; note = 2'-O-methyladenosine-3'-phosphate
  modified_base 17: mod_base = OTHER; note = 2'-fluoroadenosine-3'-phosphate
  modified_base 18: mod_base = OTHER; note = 2'-O-methylguanosine-3'-phosphate
  modified_base 19: mod_base = OTHER; note = 2'-fluoroadenosine-3'-phosphate
  modified_base 20: mod_base = OTHER; note = 2'-O-methyluridine-3'-phosphate
  modified_base 21: mod_base = OTHER; note 2'-fluoroadenosine-3'-phosphate-N-[tris(GalNAc-alkyl)-amido decanoyl)]-4-hydroxyprolinol (Hyp-(GalNAc-alkyl)3)
gggagaaaggtgttcaagata

SEQ ID NO: 4151 - protein, 11 aa, unidentified
AALLPVLLAAP

SEQ ID NO: 4152 - protein, 13 aa, Human immunodeficiency virus
GRKKRRQRRRPPQ

SEQ ID NO: 4153 - protein, 16 aa, Drosophila sp.
RQIKIWFQNRRMKWKK

SEQ ID NO: 4154 - protein, 16 aa, unidentified
AAVALLPAVLLALLAP

SEQ ID NO: 4155 - DNA, 20 bp, synthetic construct
  source 1..20: mol_type = other DNA
  modified_base 1: mod_base = OTHER; note = 2'-O-methylguanosine-3'- phosphorothioate
  modified_base 2: mod_base = OTHER; note = 2'-O-methylguanosine-3'- phosphorothioate
  modified_base 3: mod_base = OTHER; note = 2'-O-methylguanosine-3'- phosphorothioate
  modified_base 4: mod_base = OTHER; note = 2'-O-methyladenosine-3'- phosphorothioate
  modified_base 5: mod_base = OTHER; note = 2'-O-methylguanosine-3'- phosphorothioate
  modified_base 6: mod_base = OTHER; note = 5'-methyl-deoxycytidine-3'-phosphorothioate
  modified_base 7: mod_base = OTHER; note = 2'-deoxyadenosine-3'-phosphorothioate
  modified_base 8: mod_base = OTHER; note = 2'-deoxythymidine-3'-phosphorothioate
  modified_base 9: mod_base = OTHER; note = 2'-deoxythymidine-3'-phosphorothioate
  modified_base 10: mod_base = OTHER; note = 2'-deoxythymidine-3'-phosphorothioate
  modified_base 11: mod_base = OTHER; note = 2'-deoxythymidine-3'-phosphorothioate
  modified_base 12: mod_base = OTHER; note = 5'-methyl-deoxycytidine-3'-phosphorothioate
  modified_base 13: mod_base = OTHER; note = 2'-deoxyadenosine-3'-phosphorothioate
  modified_base 14: mod_base = OTHER; note = 5'-methyl-deoxycytidine-3'-phosphorothioate
  modified_base 15: mod_base = OTHER; note = 2'-deoxyadenosine-3'-phosphorothioate
  modified_base 16: mod_base = OTHER; note = 2'-O-methylguanosine-3'- phosphorothioate
  modified_base 17: mod_base = OTHER; note = 2'-O-methylguanosine-3'- phosphorothioate
  modified_base 18: mod_base = OTHER; note = 2'-O-methyluridine-3'-phosphorothioate
  modified_base 19: mod_base = OTHER; note = 2'-O-methyluridine-3'-phosphorothioate
  modified_base 20: mod_base = OTHER; note = 2'-O-methyladenosine-3'-phosphate
  misc_feature 1..5: note = RNA
  misc_feature 6..15: note = DNA
  misc_feature 16..20: note = RNA
gggagcattttcacaggtta

SEQ ID NO: 4156 - DNA, 20 bp, synthetic construct
  source 1..20: mol_type = other DNA
  modified_base 1: mod_base = OTHER; note = 2'-O-methyladenosine-3'- phosphorothioate
  modified_base 2: mod_base = OTHER; note = 2'-O-methyladenosine-3'- phosphorothioate
  modified_base 3: mod_base = OTHER; note = 2'-O-methyluridine-3'-phosphorothioate
  modified_base 4: mod_base = OTHER; note = 2'-O-methyluridine-3'-phosphorothioate
  modified_base 5: mod_base = OTHER; note = 2'-O-methyladenosine-3'- phosphorothioate
  modified_base 6: mod_base = OTHER; note = 2'-deoxyguanosine-3'-phosphorothioate
  modified_base 7: mod_base = OTHER; note = 5'-methyl-deoxycytidine-3'-phosphorothioate
  modified_base 8: mod_base = OTHER; note = 5'-methyl-deoxycytidine-3'-phosphorothioate
  modified_base 9: mod_base = OTHER; note = 2'-deoxyguanosine-3'-phosphorothioate
  modified_base 10: mod_base = OTHER; note = 2'-deoxyguanosine-3'-phosphorothioate
  modified_base 11: mod_base = OTHER; note = 2'-deoxyguanosine-3'-phosphorothioate
  modified_base 12: mod_base = OTHER; note = 2'-deoxyguanosine-3'-phosphorothioate
  modified_base 13: mod_base = OTHER; note = 2'-deoxyguanosine-3'-phosphorothioate
  modified_base 14: mod_base = OTHER; note = 2'-deoxyadenosine-3'-phosphorothioate
  modified_base 15: mod_base = OTHER; note = 2'-deoxyguanosine-3'-phosphorothioate
  modified_base 16: mod_base = OTHER; note = 2'-O-methylcytidine-3'- phosphorothioate
  modified_base 17: mod_base = OTHER; note = 2'-O-methyladenosine-3'- phosphorothioate
  modified_base 18: mod_base = OTHER; note = 2'-O-methyluridine-3'-phosphorothioate
  modified_base 19: mod_base = OTHER; note = 2'-O-methyluridine-3'-phosphorothioate
  modified_base 20: mod_base = OTHER; note = 2'-O-methyluridine-3'-phosphate
  misc_feature 1..5: note = RNA
  misc_feature 6..15: note = DNA
  misc_feature 16..20: note = RNA
aattagccgggggagcattt

SEQ ID NO: 4157 - DNA, 20 bp, synthetic construct
  source 1..20: mol_type = other DNA
  modified_base 1: mod_base = OTHER; note = 2'-O-methyladenosine-3'- phosphorothioate
  modified_base 2: mod_base = OTHER; note = 2'-O-methyluridine-3'-phosphorothioate
  modified_base 3: mod_base = OTHER; note = 2'-O-methylcytidine-3'- phosphorothioate
  modified_base 4: mod_base = OTHER; note = 2'-O-methyladenosine-3'- phosphorothioate
  modified_base 5: mod_base = OTHER; note = 2'-O-methyluridine-3'-phosphorothioate
  modified_base 6: mod_base = OTHER; note = 2'-deoxythymidine-3'-phosphorothioate
  modified_base 7: mod_base = OTHER; note = 2'-deoxyguanosine-3'-phosphorothioate
  modified_base 8: mod_base = OTHER; note = 2'-deoxyadenosine-3'-phosphorothioate
  modified_base 9: mod_base = OTHER; note = 2'-deoxythymidine-3'-phosphorothioate
  modified_base 10: mod_base = OTHER; note = 2'-deoxyadenosine-3'-phosphorothioate
  modified_base 11: mod_base = OTHER; note = 5'-methyl-deoxycytidine-3'-phosphorothioate
  modified_base 12: mod_base = OTHER; note = 2'-deoxyadenosine-3'-phosphorothioate
  modified_base 13: mod_base = OTHER; note = 2'-deoxyadenosine-3'-phosphorothioate
  modified_base 14: mod_base = OTHER; note = 2'-deoxyadenosine-3'-phosphorothioate
  modified_base 15: mod_base = OTHER; note = 2'-deoxythymidine-3'-phosphorothioate
  modified_base 16: mod_base = OTHER; note = 2'-O-methyluridine-3'-phosphorothioate
  modified_base 17: mod_base = OTHER; note = 2'-O-methyladenosine-3'- phosphorothioate
  modified_base 18: mod_base = OTHER; note = 2'-O-methylguanosine-3'- phosphorothioate
  modified_base 19: mod_base = OTHER; note = 2'-O-methylcytidine-3'- phosphorothioate
  modified_base 20: mod_base = OTHER; note = 2'-O-methylcytidine-3'-phosphate
  misc_feature 1..5: note = RNA
  misc_feature 6..15: note = DNA
  misc_feature 16..20: note = RNA
atcattgatacaaattagcc

SEQ ID NO: 4158 - DNA, 20 bp, synthetic construct
  source 1..20: mol_type = other DNA
  modified_base 1: mod_base = OTHER; note = 2'-O-methylguanosine-3'- phosphorothioate
  modified_base 2: mod_base = OTHER; note = 2'-O-methyluridine-3'-phosphorothioate
  modified_base 3: mod_base = OTHER; note = 2'-O-methyluridine-3'-phosphorothioate
  modified_base 4: mod_base = OTHER; note = 2'-O-methylguanosine-3'- phosphorothioate
  modified_base 5: mod_base = OTHER; note = 2'-O-methyluridine-3'-phosphorothioate
  modified_base 6: mod_base = OTHER; note = 2'-deoxythymidine-3'-phosphorothioate
  modified_base 7: mod_base = OTHER; note = 5'-methyl-deoxycytidine-3'-phosphorothioate
  modified_base 8: mod_base = OTHER; note = 2'-deoxyadenosine-3'-phosphorothioate
  modified_base 9: mod_base = OTHER; note = 2'-deoxythymidine-3'-phosphorothioate
  modified_base 10: mod_base = OTHER; note = 2'-deoxyadenosine-3'-phosphorothioate
  modified_base 11: mod_base = OTHER; note = 2'-deoxyadenosine-3'-phosphorothioate
  modified_base 12: mod_base = OTHER; note = 2'-deoxythymidine-3'-phosphorothioate
  modified_base 13: mod_base = OTHER; note = 5'-methyl-deoxycytidine-3'-phosphorothioate
  modified_base 14: mod_base = OTHER; note = 2'-deoxyadenosine-3'-phosphorothioate
  modified_base 15: mod_base = OTHER; note = 2'-deoxythymidine-3'-phosphorothioate
  modified_base 16: mod_base = OTHER; note = 2'-O-methyluridine-3'-phosphorothioate
  modified_base 17: mod_base = OTHER; note = 2'-O-methylguanosine-3'- phosphorothioate
  modified_base 18: mod_base = OTHER; note = 2'-O-methyladenosine-3'- phosphorothioate
  modified_base 19: mod_base = OTHER; note = 2'-O-methyluridine-3'-phosphorothioate
  modified_base 20: mod_base = OTHER; note = 2'-O-methyladenosine-3'-phosphate
  misc_feature 1..5: note = RNA
  misc_feature 6..15: note = DNA
  misc_feature 16..20: note = RNA
gttgttcataatcattgata

SEQ ID NO: 4159 - DNA, 20 bp, synthetic construct
  source 1..20: mol_type = other DNA
  modified_base 1: mod_base = OTHER; note = 2'-O-methylguanosine-3'- phosphorothioate
  modified_base 2: mod_base = OTHER; note = 2'-O-methyladenosine-3'- phosphorothioate
  modified_base 3: mod_base = OTHER; note = 2'-O-methyluridine-3'-phosphorothioate
  modified_base 4: mod_base = OTHER; note = 2'-O-methyluridine-3'-phosphorothioate
  modified_base 5: mod_base = OTHER; note = 2'-O-methyluridine-3'-phosphorothioate
  modified_base 6: mod_base = OTHER; note = 2'-deoxyadenosine-3'-phosphorothioate
  modified_base 7: mod_base = OTHER; note = 2'-deoxyguanosine-3'-phosphorothioate
  modified_base 8: mod_base = OTHER; note = 5'-methyl-deoxycytidine-3'-phosphorothioate
  modified_base 9: mod_base = OTHER; note = 2'-deoxyadenosine-3'-phosphorothioate
  modified_base 10: mod_base = OTHER; note = 2'-deoxythymidine-3'-phosphorothioate
  modified_base 11: mod_base = OTHER; note = 2'-deoxyguanosine-3'-phosphorothioate
  modified_base 12: mod_base = OTHER; note = 2'-deoxythymidine-3'-phosphorothioate
  modified_base 13: mod_base = OTHER; note = 2'-deoxythymidine-3'-phosphorothioate
  modified_base 14: mod_base = OTHER; note = 2'-deoxyguanosine-3'-phosphorothioate
  modified_base 15: mod_base = OTHER; note = 2'-deoxythymidine-3'-phosphorothioate
  modified_base 16: mod_base = OTHER; note = 2'-O-methyluridine-3'-phosphorothioate
  modified_base 17: mod_base = OTHER; note = 2'-O-methylcytidine-3'- phosphorothioate
  modified_base 18: mod_base = OTHER; note = 2'-O-methyladenosine-3'- phosphorothioate
  modified_base 19: mod_base = OTHER; note = 2'-O-methyluridine-3'-phosphorothioate
  modified_base 20: mod_base = OTHER; note = 2'-O-methyladenosine-3'-phosphate
  misc_feature 1..5: note = RNA
  misc_feature 6..15: note = DNA
  misc_feature 16..20: note = RNA
gatttagcatgttgttcata

SEQ ID NO: 4160 - DNA, 20 bp, synthetic construct
  source 1..20: mol_type = other DNA
  modified_base 1: mod_base = OTHER; note = 2'-O-methyluridine-3'-phosphorothioate
  modified_base 2: mod_base = OTHER; note = 2'-O-methyluridine-3'-phosphorothioate
  modified_base 3: mod_base = OTHER; note = 2'-O-methylguanosine-3'- phosphorothioate
  modified_base 4: mod_base = OTHER; note = 2'-O-methylguanosine-3'- phosphorothioate
  modified_base 5: mod_base = OTHER; note = 2'-O-methyladenosine-3'- phosphorothioate
  modified_base 6: mod_base = OTHER; note = 2'-deoxyadenosine-3'-phosphorothioate
  modified_base 7: mod_base = OTHER; note = 2'-deoxyguanosine-3'-phosphorothioate
  modified_base 8: mod_base = OTHER; note = 2'-deoxythymidine-3'-phosphorothioate
  modified_base 9: mod_base = OTHER; note = 2'-deoxyadenosine-3'-phosphorothioate
  modified_base 10: mod_base = OTHER; note = 5'-methyl-deoxycytidine-3'-phosphorothioate
  modified_base 11: mod_base = OTHER; note = 2'-deoxythymidine-3'-phosphorothioate
  modified_base 12: mod_base = OTHER; note = 2'-deoxyguanosine-3'-phosphorothioate
  modified_base 13: mod_base = OTHER; note = 2'-deoxyadenosine-3'-phosphorothioate
  modified_base 14: mod_base = OTHER; note = 2'-deoxythymidine-3'-phosphorothioate
  modified_base 15: mod_base = OTHER; note = 2'-deoxythymidine-3'-phosphorothioate
  modified_base 16: mod_base = OTHER; note = 2'-O-methyluridine-3'-phosphorothioate
  modified_base 17: mod_base = OTHER; note = 2'-O-methyladenosine-3'- phosphorothioate
  modified_base 18: mod_base = OTHER; note = 2'-O-methylguanosine-3'- phosphorothioate
  modified_base 19: mod_base = OTHER; note = 2'-O-methylcytidine-3'- phosphorothioate
  modified_base 20: mod_base = OTHER; note = 2'-O-methyladenosine-3'-phosphate
  misc_feature 1..5: note = RNA
  misc_feature 6..15: note = DNA
  misc_feature 16..20: note = RNA
ttggaagtactgatttagca

SEQ ID NO: 4161 - DNA, 20 bp, synthetic construct
  source 1..20: mol_type = other DNA
  modified_base 1: mod_base = OTHER; note = 2'-O-methylcytidine-3'- phosphorothioate
  modified_base 2: mod_base = OTHER; note = 2'-O-methyladenosine-3'- phosphorothioate
  modified_base 3: mod_base = OTHER; note = 2'-O-methyluridine-3'-phosphorothioate
  modified_base 4: mod_base = OTHER; note = 2'-O-methyladenosine-3'- phosphorothioate
  modified_base 5: mod_base = OTHER; note = 2'-O-methyluridine-3'-phosphorothioate
  modified_base 6: mod_base = OTHER; note = 2'-deoxyadenosine-3'-phosphorothioate
  modified_base 7: mod_base = OTHER; note = 2'-deoxythymidine-3'-phosphorothioate
  modified_base 8: mod_base = OTHER; note = 2'-deoxyadenosine-3'-phosphorothioate
  modified_base 9: mod_base = OTHER; note = 2'-deoxyguanosine-3'-phosphorothioate
  modified_base 10: mod_base = OTHER; note = 2'-deoxyadenosine-3'-phosphorothioate
  modified_base 11: mod_base = OTHER; note = 5'-methyl-deoxycytidine-3'-phosphorothioate
  modified_base 12: mod_base = OTHER; note = 2'-deoxythymidine-3'-phosphorothioate
  modified_base 13: mod_base = OTHER; note = 2'-deoxythymidine-3'-phosphorothioate
  modified_base 14: mod_base = OTHER; note = 2'-deoxythymidine-3'-phosphorothioate
  modified_base 15: mod_base = OTHER; note = 2'-deoxyguanosine-3'-phosphorothioate
  modified_base 16: mod_base = OTHER; note = 2'-O-methylguanosine-3'- phosphorothioate
  modified_base 17: mod_base = OTHER; note = 2'-O-methyladenosine-3'- phosphorothioate
  modified_base 18: mod_base = OTHER; note = 2'-O-methyladenosine-3'- phosphorothioate
  modified_base 19: mod_base = OTHER; note = 2'-O-methylguanosine-3'- phosphorothioate
  modified_base 20: mod_base = OTHER; note = 2'-O-methyluridine-3'-phosphate
  misc_feature 1..5: note = RNA
  misc_feature 6..15: note = DNA
  misc_feature 16..20: note = RNA
catatatagactttggaagt

SEQ ID NO: 4162 - DNA, 20 bp, synthetic construct
  source 1..20: mol_type = other DNA
  modified_base 1: mod_base = OTHER; note = 2'-O-methylcytidine-3'- phosphorothioate
  modified_base 2: mod_base = OTHER; note = 2'-O-methyluridine-3'-phosphorothioate
  modified_base 3: mod_base = OTHER; note = 2'-O-methylguanosine-3'- phosphorothioate
  modified_base 4: mod_base = OTHER; note = 2'-O-methyluridine-3'-phosphorothioate
  modified_base 5: mod_base = OTHER; note = 2'-O-methyladenosine-3'- phosphorothioate
  modified_base 6: mod_base = OTHER; note = 2'-deoxyadenosine-3'-phosphorothioate
  modified_base 7: mod_base = OTHER; note = 2'-deoxythymidine-3'-phosphorothioate
  modified_base 8: mod_base = OTHER; note = 2'-deoxyadenosine-3'-phosphorothioate
  modified_base 9: mod_base = OTHER; note = 2'-deoxyguanosine-3'-phosphorothioate
  modified_base 10: mod_base = OTHER; note = 2'-deoxythymidine-3'-phosphorothioate
  modified_base 11: mod_base = OTHER; note = 5'-methyl-deoxycytidine-3'-phosphorothioate
  modified_base 12: mod_base = OTHER; note = 2'-deoxyadenosine-3'-phosphorothioate
  modified_base 13: mod_base = OTHER; note = 2'-deoxythymidine-3'-phosphorothioate
  modified_base 14: mod_base = OTHER; note = 2'-deoxyadenosine-3'-phosphorothioate
  modified_base 15: mod_base = OTHER; note = 2'-deoxythymidine-3'-phosphorothioate
  modified_base 16: mod_base = OTHER; note = 2'-O-methyladenosine-3'- phosphorothioate
  modified_base 17: mod_base = OTHER; note = 2'-O-methyluridine-3'-phosphorothioate
  modified_base 18: mod_base = OTHER; note = 2'-O-methyladenosine-3'- phosphorothioate
  modified_base 19: mod_base = OTHER; note = 2'-O-methylguanosine-3'- phosphorothioate
  modified_base 20: mod_base = OTHER; note = 2'-O-methyladenosine-3'-phosphate
  misc_feature 1..5: note = RNA
  misc_feature 6..15: note = DNA
  misc_feature 16..20: note = RNA
ctgtaatagtcatatataga

SEQ ID NO: 4163 - DNA, 20 bp, synthetic construct
  source 1..20: mol_type = other DNA
  modified_base 1: mod_base = OTHER; note = 2'-O-methyluridine-3'-phosphorothioate
  modified_base 2: mod_base = OTHER; note = 2'-O-methyluridine-3'-phosphorothioate
  modified_base 3: mod_base = OTHER; note = 2'-O-methylguanosine-3'- phosphorothioate
  modified_base 4: mod_base = OTHER; note = 2'-O-methylcytidine-3'- phosphorothioate
  modified_base 5: mod_base = OTHER; note = 2'-O-methylcytidine-3'- phosphorothioate
  modified_base 6: mod_base = OTHER; note = 5'-methyl-deoxycytidine-3'-phosphorothioate
  modified_base 7: mod_base = OTHER; note = 5'-methyl-deoxycytidine-3'-phosphorothioate
  modified_base 8: mod_base = OTHER; note = 2'-deoxyadenosine-3'-phosphorothioate
  modified_base 9: mod_base = OTHER; note = 2'-deoxyguanosine-3'-phosphorothioate
  modified_base 10: mod_base = OTHER; note = 2'-deoxyadenosine-3'-phosphorothioate
  modified_base 11: mod_base = OTHER; note = 5'-methyl-deoxycytidine-3'-phosphorothioate
  modified_base 12: mod_base = OTHER; note = 5'-methyl-deoxycytidine-3'-phosphorothioate
  modified_base 13: mod_base = OTHER; note = 2'-deoxythymidine-3'-phosphorothioate
  modified_base 14: mod_base = OTHER; note = 2'-deoxyguanosine-3'-phosphorothioate
  modified_base 15: mod_base = OTHER; note = 2'-deoxythymidine-3'-phosphorothioate
  modified_base 16: mod_base = OTHER; note = 2'-O-methyladenosine-3'- phosphorothioate
  modified_base 17: mod_base = OTHER; note = 2'-O-methyladenosine-3'- phosphorothioate
  modified_base 18: mod_base = OTHER; note = 2'-O-methyluridine-3'-phosphorothioate
  modified_base 19: mod_base = OTHER; note = 2'-O-methyladenosine-3'- phosphorothioate
  modified_base 20: mod_base = OTHER; note = 2'-O-methylguanosine-3'-phosphate
  misc_feature 1..5: note = RNA
  misc_feature 6..15: note = DNA
  misc_feature 16..20: note = RNA
ttgccccagacctgtaatag

SEQ ID NO: 4164 - DNA, 20 bp, synthetic construct
  source 1..20: mol_type = other DNA
  modified_base 1: mod_base = OTHER; note = 2'-O-methyluridine-3'-phosphorothioate
  modified_base 2: mod_base = OTHER; note = 2'-O-methyluridine-3'-phosphorothioate
  modified_base 3: mod_base = OTHER; note = 2'-O-methylcytidine-3'- phosphorothioate
  modified_base 4: mod_base = OTHER; note = 2'-O-methyluridine-3'-phosphorothioate
  modified_base 5: mod_base = OTHER; note = 2'-O-methyluridine-3'-phosphorothioate
  modified_base 6: mod_base = OTHER; note = 5'-methyl-deoxycytidine-3'-phosphorothioate
  modified_base 7: mod_base = OTHER; note = 2'-deoxyadenosine-3'-phosphorothioate
  modified_base 8: mod_base = OTHER; note = 2'-deoxythymidine-3'-phosphorothioate
  modified_base 9: mod_base = OTHER; note = 5'-methyl-deoxycytidine-3'-phosphorothioate
  modified_base 10: mod_base = OTHER; note = 2'-deoxyadenosine-3'-phosphorothioate
  modified_base 11: mod_base = OTHER; note = 2'-deoxythymidine-3'-phosphorothioate
  modified_base 12: mod_base = OTHER; note = 2'-deoxythymidine-3'-phosphorothioate
  modified_base 13: mod_base = OTHER; note = 2'-deoxythymidine-3'-phosphorothioate
  modified_base 14: mod_base = OTHER; note = 2'-deoxyguanosine-3'-phosphorothioate
  modified_base 15: mod_base = OTHER; note = 5'-methyl-deoxycytidine-3'-phosphorothioate
  modified_base 16: mod_base = OTHER; note = 2'-O-methylcytidine-3'- phosphorothioate
  modified_base 17: mod_base = OTHER; note = 2'-O-methylcytidine-3'- phosphorothioate
  modified_base 18: mod_base = OTHER; note = 2'-O-methylcytidine-3'- phosphorothioate
  modified_base 19: mod_base = OTHER; note = 2'-O-methyladenosine-3'- phosphorothioate
  modified_base 20: mod_base = OTHER; note = 2'-O-methylguanosine-3'-phosphate
  misc_feature 1..5: note = RNA
  misc_feature 6..15: note = DNA
  misc_feature 16..20: note = RNA
ttcttcatcatttgccccag

SEQ ID NO: 4165 - DNA, 20 bp, synthetic construct
  source 1..20: mol_type = other DNA
  modified_base 1: mod_base = OTHER; note = 2'-O-methyluridine-3'-phosphorothioate
  modified_base 2: mod_base = OTHER; note = 2'-O-methyladenosine-3'- phosphorothioate
  modified_base 3: mod_base = OTHER; note = 2'-O-methyluridine-3'-phosphorothioate
  modified_base 4: mod_base = OTHER; note = 2'-O-methylcytidine-3'- phosphorothioate
  modified_base 5: mod_base = OTHER; note = 2'-O-methyladenosine-3'- phosphorothioate
  modified_base 6: mod_base = OTHER; note = 2'-deoxyguanosine-3'-phosphorothioate
  modified_base 7: mod_base = OTHER; note = 5'-methyl-deoxycytidine-3'-phosphorothioate
  modified_base 8: mod_base = OTHER; note = 5'-methyl-deoxycytidine-3'-phosphorothioate
  modified_base 9: mod_base = OTHER; note = 2'-deoxyadenosine-3'-phosphorothioate
  modified_base 10: mod_base = OTHER; note = 2'-deoxyadenosine-3'-phosphorothioate
  modified_base 11: mod_base = OTHER; note = 2'-deoxyadenosine-3'-phosphorothioate
  modified_base 12: mod_base = OTHER; note = 2'-deoxyguanosine-3'-phosphorothioate
  modified_base 13: mod_base = OTHER; note = 2'-deoxythymidine-3'-phosphorothioate
  modified_base 14: mod_base = OTHER; note = 2'-deoxythymidine-3'-phosphorothioate
  modified_base 15: mod_base = OTHER; note = 2'-deoxythymidine-3'-phosphorothioate
  modified_base 16: mod_base = OTHER; note = 2'-O-methylcytidine-3'- phosphorothioate
  modified_base 17: mod_base = OTHER; note = 2'-O-methyluridine-3'-phosphorothioate
  modified_base 18: mod_base = OTHER; note = 2'-O-methyluridine-3'-phosphorothioate
  modified_base 19: mod_base = OTHER; note = 2'-O-methylcytidine-3'- phosphorothioate
  modified_base 20: mod_base = OTHER; note = 2'-O-methyladenosine-3'-phosphate
  misc_feature 1..5: note = RNA
  misc_feature 6..15: note = DNA
  misc_feature 16..20: note = RNA
tatcagccaaagtttcttca

SEQ ID NO: 4166 - DNA, 20 bp, synthetic construct
  source 1..20: mol_type = other DNA
  modified_base 1: mod_base = OTHER; note = 2'-O-methylguanosine-3'- phosphorothioate
  modified_base 2: mod_base = OTHER; note = 2'-O-methylcytidine-3'- phosphorothioate
  modified_base 3: mod_base = OTHER; note = 2'-O-methyluridine-3'-phosphorothioate
  modified_base 4: mod_base = OTHER; note = 2'-O-methylguanosine-3'- phosphorothioate
  modified_base 5: mod_base = OTHER; note = 2'-O-methylcytidine-3'- phosphorothioate
  modified_base 6: mod_base = OTHER; note = 2'-deoxyadenosine-3'-phosphorothioate
  modified_base 7: mod_base = OTHER; note = 2'-deoxyadenosine-3'-phosphorothioate
  modified_base 8: mod_base = OTHER; note = 2'-deoxythymidine-3'-phosphorothioate
  modified_base 9: mod_base = OTHER; note = 2'-deoxyadenosine-3'-phosphorothioate
  modified_base 10: mod_base = OTHER; note = 2'-deoxythymidine-3'-phosphorothioate
  modified_base 11: mod_base = OTHER; note = 2'-deoxythymidine-3'-phosphorothioate
  modified_base 12: mod_base = OTHER; note = 2'-deoxyadenosine-3'-phosphorothioate
  modified_base 13: mod_base = OTHER; note = 2'-deoxythymidine-3'-phosphorothioate
  modified_base 14: mod_base = OTHER; note = 5'-methyl-deoxycytidine-3'-phosphorothioate
  modified_base 15: mod_base = OTHER; note = 2'-deoxyadenosine-3'-phosphorothioate
  modified_base 16: mod_base = OTHER; note = 2'-O-methylguanosine-3'- phosphorothioate
  modified_base 17: mod_base = OTHER; note = 2'-O-methylcytidine-3'- phosphorothioate
  modified_base 18: mod_base = OTHER; note = 2'-O-methylcytidine-3'- phosphorothioate
  modified_base 19: mod_base = OTHER; note = 2'-O-methyladenosine-3'- phosphorothioate
  modified_base 20: mod_base = OTHER; note = 2'-O-methyladenosine-3'-phosphate
  misc_feature 1..5: note = RNA
  misc_feature 6..15: note = DNA
  misc_feature 16..20: note = RNA
gctgcaatattatcagccaa

SEQ ID NO: 4167 - DNA, 20 bp, synthetic construct
  source 1..20: mol_type = other DNA
  modified_base 1: mod_base = OTHER; note = 2'-O-methyladenosine-3'- phosphorothioate
  modified_base 2: mod_base = OTHER; note = 2'-O-methyluridine-3'-phosphorothioate
  modified_base 3: mod_base = OTHER; note = 2'-O-methylcytidine-3'- phosphorothioate
  modified_base 4: mod_base = OTHER; note = 2'-O-methyluridine-3'-phosphorothioate
  modified_base 5: mod_base = OTHER; note = 2'-O-methylguanosine-3'- phosphorothioate
  modified_base 6: mod_base = OTHER; note = 2'-deoxyguanosine-3'-phosphorothioate
  modified_base 7: mod_base = OTHER; note = 2'-deoxyadenosine-3'-phosphorothioate
  modified_base 8: mod_base = OTHER; note = 2'-deoxyadenosine-3'-phosphorothioate
  modified_base 9: mod_base = OTHER; note = 2'-deoxyadenosine-3'-phosphorothioate
  modified_base 10: mod_base = OTHER; note = 2'-deoxyadenosine-3'-phosphorothioate
  modified_base 11: mod_base = OTHER; note = 2'-deoxythymidine-3'-phosphorothioate
  modified_base 12: mod_base = OTHER; note = 2'-deoxyguanosine-3'-phosphorothioate
  modified_base 13: mod_base = OTHER; note = 5'-methyl-deoxycytidine-3'-phosphorothioate
  modified_base 14: mod_base = OTHER; note = 2'-deoxythymidine-3'-phosphorothioate
  modified_base 15: mod_base = OTHER; note = 2'-deoxyguanosine-3'-phosphorothioate
  modified_base 16: mod_base = OTHER; note = 2'-O-methylcytidine-3'- phosphorothioate
  modified_base 17: mod_base = OTHER; note = 2'-O-methyladenosine-3'- phosphorothioate
  modified_base 18: mod_base = OTHER; note = 2'-O-methyladenosine-3'- phosphorothioate
  modified_base 19: mod_base = OTHER; note = 2'-O-methyluridine-3'-phosphorothioate
  modified_base 20: mod_base = OTHER; note = 2'-O-methyladenosine-3'-phosphate
  misc_feature 1..5: note = RNA
  misc_feature 6..15: note = DNA
  misc_feature 16..20: note = RNA
atctggaaaatgctgcaata

SEQ ID NO: 4168 - DNA, 20 bp, synthetic construct
  source 1..20: mol_type = other DNA
  modified_base 1: mod_base = OTHER; note = 2'-O-methylguanosine-3'- phosphorothioate
  modified_base 2: mod_base = OTHER; note = 2'-O-methyladenosine-3'- phosphorothioate
  modified_base 3: mod_base = OTHER; note = 2'-O-methyluridine-3'-phosphorothioate
  modified_base 4: mod_base = OTHER; note = 2'-O-methyladenosine-3'- phosphorothioate
  modified_base 5: mod_base = OTHER; note = 2'-O-methylcytidine-3'- phosphorothioate
  modified_base 6: mod_base = OTHER; note = 2'-deoxyadenosine-3'-phosphorothioate
  modified_base 7: mod_base = OTHER; note = 2'-deoxyguanosine-3'-phosphorothioate
  modified_base 8: mod_base = OTHER; note = 5'-methyl-deoxycytidine-3'-phosphorothioate
  modified_base 9: mod_base = OTHER; note = 2'-deoxythymidine-3'-phosphorothioate
  modified_base 10: mod_base = OTHER; note = 2'-deoxythymidine-3'-phosphorothioate
  modified_base 11: mod_base = OTHER; note = 5'-methyl-deoxycytidine-3'-phosphorothioate
  modified_base 12: mod_base = OTHER; note = 5'-methyl-deoxycytidine-3'-phosphorothioate
  modified_base 13: mod_base = OTHER; note = 2'-deoxyadenosine-3'-phosphorothioate
  modified_base 14: mod_base = OTHER; note = 2'-deoxythymidine-3'-phosphorothioate
  modified_base 15: mod_base = OTHER; note = 5'-methyl-deoxycytidine-3'-phosphorothioate
  modified_base 16: mod_base = OTHER; note = 2'-O-methyluridine-3'-phosphorothioate
  modified_base 17: mod_base = OTHER; note = 2'-O-methylguanosine-3'- phosphorothioate
  modified_base 18: mod_base = OTHER; note = 2'-O-methylguanosine-3'- phosphorothioate
  modified_base 19: mod_base = OTHER; note = 2'-O-methyladenosine-3'- phosphorothioate
  modified_base 20: mod_base = OTHER; note = 2'-O-methyladenosine-3'-phosphate
  misc_feature 1..5: note = RNA
  misc_feature 6..15: note = DNA
  misc_feature 16..20: note = RNA
gatacagcttccatctggaa

SEQ ID NO: 4169 - DNA, 20 bp, synthetic construct
  source 1..20: mol_type = other DNA
  modified_base 1: mod_base = OTHER; note = 2'-O-methylguanosine-3'- phosphorothioate
  modified_base 2: mod_base = OTHER; note = 2'-O-methyladenosine-3'- phosphorothioate
  modified_base 3: mod_base = OTHER; note = 2'-O-methylguanosine-3'- phosphorothioate
  modified_base 4: mod_base = OTHER; note = 2'-O-methylcytidine-3'- phosphorothioate
  modified_base 5: mod_base = OTHER; note = 2'-O-methyladenosine-3'- phosphorothioate
  modified_base 6: mod_base = OTHER; note = 2'-deoxythymidine-3'-phosphorothioate
  modified_base 7: mod_base = OTHER; note = 5'-methyl-deoxycytidine-3'-phosphorothioate
  modified_base 8: mod_base = OTHER; note = 5'-methyl-deoxycytidine-3'-phosphorothioate
  modified_base 9: mod_base = OTHER; note = 2'-deoxythymidine-3'-phosphorothioate
  modified_base 10: mod_base = OTHER; note = 2'-deoxythymidine-3'-phosphorothioate
  modified_base 11: mod_base = OTHER; note = 2'-deoxyguanosine-3'-phosphorothioate
  modified_base 12: mod_base = OTHER; note = 2'-deoxyguanosine-3'-phosphorothioate
  modified_base 13: mod_base = OTHER; note = 2'-deoxyadenosine-3'-phosphorothioate
  modified_base 14: mod_base = OTHER; note = 2'-deoxythymidine-3'-phosphorothioate
  modified_base 15: mod_base = OTHER; note = 2'-deoxyadenosine-3'-phosphorothioate
  modified_base 16: mod_base = OTHER; note = 2'-O-methylcytidine-3'- phosphorothioate
  modified_base 17: mod_base = OTHER; note = 2'-O-methyladenosine-3'- phosphorothioate
  modified_base 18: mod_base = OTHER; note = 2'-O-methylguanosine-3'- phosphorothioate
  modified_base 19: mod_base = OTHER; note = 2'-O-methylcytidine-3'- phosphorothioate
  modified_base 20: mod_base = OTHER; note = 2'-O-methyluridine-3'-phosphate
  misc_feature 1..5: note = RNA
  misc_feature 6..15: note = DNA
  misc_feature 16..20: note = RNA
gagcatccttggatacagct

SEQ ID NO: 4170 - DNA, 20 bp, synthetic construct
  source 1..20: mol_type = other DNA
  modified_base 1: mod_base = OTHER; note = 2'-O-methylcytidine-3'- phosphorothioate
  modified_base 2: mod_base = OTHER; note = 2'-O-methyladenosine-3'- phosphorothioate
  modified_base 3: mod_base = OTHER; note = 2'-O-methyladenosine-3'- phosphorothioate
  modified_base 4: mod_base = OTHER; note = 2'-O-methylcytidine-3'- phosphorothioate
  modified_base 5: mod_base = OTHER; note = 2'-O-methyladenosine-3'- phosphorothioate
  modified_base 6: mod_base = OTHER; note = 2'-deoxythymidine-3'-phosphorothioate
  modified_base 7: mod_base = OTHER; note = 2'-deoxythymidine-3'-phosphorothioate
  modified_base 8: mod_base = OTHER; note = 5'-methyl-deoxycytidine-3'-phosphorothioate
  modified_base 9: mod_base = OTHER; note = 5'-methyl-deoxycytidine-3'-phosphorothioate
  modified_base 10: mod_base = OTHER; note = 2'-deoxyguanosine-3'-phosphorothioate
  modified_base 11: mod_base = OTHER; note = 2'-deoxyguanosine-3'-phosphorothioate
  modified_base 12: mod_base = OTHER; note = 2'-deoxyadenosine-3'-phosphorothioate
  modified_base 13: mod_base = OTHER; note = 2'-deoxyguanosine-3'-phosphorothioate
  modified_base 14: mod_base = OTHER; note = 5'-methyl-deoxycytidine-3'-phosphorothioate
  modified_base 15: mod_base = OTHER; note = 2'-deoxyadenosine-3'-phosphorothioate
  modified_base 16: mod_base = OTHER; note = 2'-O-methyluridine-3'-phosphorothioate
  modified_base 17: mod_base = OTHER; note = 2'-O-methylcytidine-3'- phosphorothioate
  modified_base 18: mod_base = OTHER; note = 2'-O-methylcytidine-3'- phosphorothioate
  modified_base 19: mod_base = OTHER; note = 2'-O-methyluridine-3'-phosphorothioate
  modified_base 20: mod_base = OTHER; note = 2'-O-methyluridine-3'-phosphate
  misc_feature 1..5: note = RNA
  misc_feature 6..15: note = DNA
  misc_feature 16..20: note = RNA
caacattccggagcatcctt

SEQ ID NO: 4171 - DNA, 20 bp, synthetic construct
  source 1..20: mol_type = other DNA
  modified_base 1: mod_base = OTHER; note = 2'-O-methylguanosine-3'- phosphorothioate
  modified_base 2: mod_base = OTHER; note = 2'-O-methyladenosine-3'- phosphorothioate
  modified_base 3: mod_base = OTHER; note = 2'-O-methyluridine-3'-phosphorothioate
  modified_base 4: mod_base = OTHER; note = 2'-O-methylcytidine-3'- phosphorothioate
  modified_base 5: mod_base = OTHER; note = 2'-O-methyluridine-3'-phosphorothioate
  modified_base 6: mod_base = OTHER; note = 2'-deoxyguanosine-3'-phosphorothioate
  modified_base 7: mod_base = OTHER; note = 2'-deoxythymidine-3'-phosphorothioate
  modified_base 8: mod_base = OTHER; note = 2'-deoxythymidine-3'-phosphorothioate
  modified_base 9: mod_base = OTHER; note = 2'-deoxythymidine-3'-phosphorothioate
  modified_base 10: mod_base = OTHER; note = 5'-methyl-deoxycytidine-3'-phosphorothioate
  modified_base 11: mod_base = OTHER; note = 2'-deoxyadenosine-3'-phosphorothioate
  modified_base 12: mod_base = OTHER; note = 2'-deoxyguanosine-3'-phosphorothioate
  modified_base 13: mod_base = OTHER; note = 5'-methyl-deoxycytidine-3'-phosphorothioate
  modified_base 14: mod_base = OTHER; note = 2'-deoxyadenosine-3'-phosphorothioate
  modified_base 15: mod_base = OTHER; note = 2'-deoxyadenosine-3'-phosphorothioate
  modified_base 16: mod_base = OTHER; note = 2'-O-methylcytidine-3'- phosphorothioate
  modified_base 17: mod_base = OTHER; note = 2'-O-methyladenosine-3'- phosphorothioate
  modified_base 18: mod_base = OTHER; note = 2'-O-methyluridine-3'-phosphorothioate
  modified_base 19: mod_base = OTHER; note = 2'-O-methyluridine-3'-phosphorothioate
  modified_base 20: mod_base = OTHER; note = 2'-O-methylcytidine-3'-phosphate
  misc_feature 1..5: note = RNA
  misc_feature 6..15: note = DNA
  misc_feature 16..20: note = RNA
gatctgtttcagcaacattc

SEQ ID NO: 4172 - DNA, 20 bp, synthetic construct
  source 1..20: mol_type = other DNA
  modified_base 1: mod_base = OTHER; note = 2'-O-methyladenosine-3'- phosphorothioate
  modified_base 2: mod_base = OTHER; note = 2'-O-methylguanosine-3'- phosphorothioate
  modified_base 3: mod_base = OTHER; note = 2'-O-methyladenosine-3'- phosphorothioate
  modified_base 4: mod_base = OTHER; note = 2'-O-methyladenosine-3'- phosphorothioate
  modified_base 5: mod_base = OTHER; note = 2'-O-methylguanosine-3'- phosphorothioate
  modified_base 6: mod_base = OTHER; note = 2'-deoxythymidine-3'-phosphorothioate
  modified_base 7: mod_base = OTHER; note = 5'-methyl-deoxycytidine-3'-phosphorothioate
  modified_base 8: mod_base = OTHER; note = 2'-deoxyguanosine-3'-phosphorothioate
  modified_base 9: mod_base = OTHER; note = 2'-deoxyadenosine-3'-phosphorothioate
  modified_base 10: mod_base = OTHER; note = 5'-methyl-deoxycytidine-3'-phosphorothioate
  modified_base 11: mod_base = OTHER; note = 2'-deoxyadenosine-3'-phosphorothioate
  modified_base 12: mod_base = OTHER; note = 2'-deoxyguanosine-3'-phosphorothioate
  modified_base 13: mod_base = OTHER; note = 2'-deoxyadenosine-3'-phosphorothioate
  modified_base 14: mod_base = OTHER; note = 2'-deoxythymidine-3'-phosphorothioate
  modified_base 15: mod_base = OTHER; note = 5'-methyl-deoxycytidine-3'-phosphorothioate
  modified_base 16: mod_base = OTHER; note = 2'-O-methyluridine-3'-phosphorothioate
  modified_base 17: mod_base = OTHER; note = 2'-O-methylguanosine-3'- phosphorothioate
  modified_base 18: mod_base = OTHER; note = 2'-O-methyluridine-3'-phosphorothioate
  modified_base 19: mod_base = OTHER; note = 2'-O-methyluridine-3'-phosphorothioate
  modified_base 20: mod_base = OTHER; note = 2'-O-methyluridine-3'-phosphate
  misc_feature 1..5: note = RNA
  misc_feature 6..15: note = DNA
  misc_feature 16..20: note = RNA
agaagtcgacagatctgttt

SEQ ID NO: 4173 - DNA, 20 bp, synthetic construct
  source 1..20: mol_type = other DNA
  modified_base 1: mod_base = OTHER; note = 2'-O-methyluridine-3'-phosphorothioate
  modified_base 2: mod_base = OTHER; note = 2'-O-methylguanosine-3'- phosphorothioate
  modified_base 3: mod_base = OTHER; note = 2'-O-methyluridine-3'-phosphorothioate
  modified_base 4: mod_base = OTHER; note = 2'-O-methylcytidine-3'- phosphorothioate
  modified_base 5: mod_base = OTHER; note = 2'-O-methylcytidine-3'- phosphorothioate
  modified_base 6: mod_base = OTHER; note = 2'-deoxythymidine-3'-phosphorothioate
  modified_base 7: mod_base = OTHER; note = 2'-deoxyadenosine-3'-phosphorothioate
  modified_base 8: mod_base = OTHER; note = 2'-deoxyadenosine-3'-phosphorothioate
  modified_base 9: mod_base = OTHER; note = 2'-deoxyadenosine-3'-phosphorothioate
  modified_base 10: mod_base = OTHER; note = 2'-deoxyadenosine-3'-phosphorothioate
  modified_base 11: mod_base = OTHER; note = 5'-methyl-deoxycytidine-3'-phosphorothioate
  modified_base 12: mod_base = OTHER; note = 2'-deoxyadenosine-3'-phosphorothioate
  modified_base 13: mod_base = OTHER; note = 2'-deoxyguanosine-3'-phosphorothioate
  modified_base 14: mod_base = OTHER; note = 2'-deoxyadenosine-3'-phosphorothioate
  modified_base 15: mod_base = OTHER; note = 2'-deoxyadenosine-3'-phosphorothioate
  modified_base 16: mod_base = OTHER; note = 2'-O-methylguanosine-3'- phosphorothioate
  modified_base 17: mod_base = OTHER; note = 2'-O-methyluridine-3'-phosphorothioate
  modified_base 18: mod_base = OTHER; note = 2'-O-methylcytidine-3'- phosphorothioate
  modified_base 19: mod_base = OTHER; note = 2'-O-methylguanosine-3'- phosphorothioate
  modified_base 20: mod_base = OTHER; note = 2'-O-methyladenosine-3'-phosphate
  misc_feature 1..5: note = RNA
  misc_feature 6..15: note = DNA
  misc_feature 16..20: note = RNA
tgtcctaaaacagaagtcga

SEQ ID NO: 4174 - DNA, 20 bp, synthetic construct
  source 1..20: mol_type = other DNA
  modified_base 1: mod_base = OTHER; note = 2'-O-methyluridine-3'-phosphorothioate
  modified_base 2: mod_base = OTHER; note = 2'-O-methylguanosine-3'- phosphorothioate
  modified_base 3: mod_base = OTHER; note = 2'-O-methylcytidine-3'- phosphorothioate
  modified_base 4: mod_base = OTHER; note = 2'-O-methyluridine-3'-phosphorothioate
  modified_base 5: mod_base = OTHER; note = 2'-O-methylguanosine-3'- phosphorothioate
  modified_base 6: mod_base = OTHER; note = 2'-deoxyadenosine-3'-phosphorothioate
  modified_base 7: mod_base = OTHER; note = 5'-methyl-deoxycytidine-3'-phosphorothioate
  modified_base 8: mod_base = OTHER; note = 5'-methyl-deoxycytidine-3'-phosphorothioate
  modified_base 9: mod_base = OTHER; note = 5'-methyl-deoxycytidine-3'-phosphorothioate
  modified_base 10: mod_base = OTHER; note = 2'-deoxythymidine-3'-phosphorothioate
  modified_base 11: mod_base = OTHER; note = 5'-methyl-deoxycytidine-3'-phosphorothioate
  modified_base 12: mod_base = OTHER; note = 2'-deoxythymidine-3'-phosphorothioate
  modified_base 13: mod_base = OTHER; note = 2'-deoxyguanosine-3'-phosphorothioate
  modified_base 14: mod_base = OTHER; note = 2'-deoxythymidine-3'-phosphorothioate
  modified_base 15: mod_base = OTHER; note = 5'-methyl-deoxycytidine-3'-phosphorothioate
  modified_base 16: mod_base = OTHER; note = 2'-O-methylcytidine-3'- phosphorothioate
  modified_base 17: mod_base = OTHER; note = 2'-O-methyluridine-3'-phosphorothioate
  modified_base 18: mod_base = OTHER; note = 2'-O-methyladenosine-3'- phosphorothioate
  modified_base 19: mod_base = OTHER; note = 2'-O-methyladenosine-3'- phosphorothioate
  modified_base 20: mod_base = OTHER; note = 2'-O-methyladenosine-3'-phosphate
  misc_feature 1..5: note = RNA
  misc_feature 6..15: note = DNA
  misc_feature 16..20: note = RNA
tgctgaccctctgtcctaaa

SEQ ID NO: 4175 - DNA, 20 bp, synthetic construct
  source 1..20: mol_type = other DNA
  modified_base 1: mod_base = OTHER; note = 2'-O-methylcytidine-3'- phosphorothioate
  modified_base 2: mod_base = OTHER; note = 2'-O-methyladenosine-3'- phosphorothioate
  modified_base 3: mod_base = OTHER; note = 2'-O-methyluridine-3'-phosphorothioate
  modified_base 4: mod_base = OTHER; note = 2'-O-methyladenosine-3'- phosphorothioate
  modified_base 5: mod_base = OTHER; note = 2'-O-methyluridine-3'-phosphorothioate
  modified_base 6: mod_base = OTHER; note = 2'-deoxythymidine-3'-phosphorothioate
  modified_base 7: mod_base = OTHER; note = 2'-deoxyguanosine-3'-phosphorothioate
  modified_base 8: mod_base = OTHER; note = 2'-deoxyguanosine-3'-phosphorothioate
  modified_base 9: mod_base = OTHER; note = 5'-methyl-deoxycytidine-3'-phosphorothioate
  modified_base 10: mod_base = OTHER; note = 2'-deoxyadenosine-3'-phosphorothioate
  modified_base 11: mod_base = OTHER; note = 2'-deoxythymidine-3'-phosphorothioate
  modified_base 12: mod_base = OTHER; note = 2'-deoxyguanosine-3'-phosphorothioate
  modified_base 13: mod_base = OTHER; note = 5'-methyl-deoxycytidine-3'-phosphorothioate
  modified_base 14: mod_base = OTHER; note = 2'-deoxythymidine-3'-phosphorothioate
  modified_base 15: mod_base = OTHER; note = 2'-deoxyguanosine-3'-phosphorothioate
  modified_base 16: mod_base = OTHER; note = 2'-O-methyladenosine-3'- phosphorothioate
  modified_base 17: mod_base = OTHER; note = 2'-O-methylcytidine-3'- phosphorothioate
  modified_base 18: mod_base = OTHER; note = 2'-O-methylcytidine-3'- phosphorothioate
  modified_base 19: mod_base = OTHER; note = 2'-O-methylcytidine-3'- phosphorothioate
  modified_base 20: mod_base = OTHER; note = 2'-O-methyluridine-3'-phosphate
  misc_feature 1..5: note = RNA
  misc_feature 6..15: note = DNA
  misc_feature 16..20: note = RNA
catattggcatgctgaccct

SEQ ID NO: 4176 - DNA, 20 bp, synthetic construct
  source 1..20: mol_type = other DNA
  modified_base 1: mod_base = OTHER; note = 2'-O-methyladenosine-3'- phosphorothioate
  modified_base 2: mod_base = OTHER; note = 2'-O-methylguanosine-3'- phosphorothioate
  modified_base 3: mod_base = OTHER; note = 2'-O-methylcytidine-3'- phosphorothioate
  modified_base 4: mod_base = OTHER; note = 2'-O-methylcytidine-3'- phosphorothioate
  modified_base 5: mod_base = OTHER; note = 2'-O-methylcytidine-3'- phosphorothioate
  modified_base 6: mod_base = OTHER; note = 5'-methyl-deoxycytidine-3'-phosphorothioate
  modified_base 7: mod_base = OTHER; note = 5'-methyl-deoxycytidine-3'-phosphorothioate
  modified_base 8: mod_base = OTHER; note = 2'-deoxyadenosine-3'-phosphorothioate
  modified_base 9: mod_base = OTHER; note = 5'-methyl-deoxycytidine-3'-phosphorothioate
  modified_base 10: mod_base = OTHER; note = 2'-deoxyadenosine-3'-phosphorothioate
  modified_base 11: mod_base = OTHER; note = 5'-methyl-deoxycytidine-3'-phosphorothioate
  modified_base 12: mod_base = OTHER; note = 2'-deoxyadenosine-3'-phosphorothioate
  modified_base 13: mod_base = OTHER; note = 2'-deoxythymidine-3'-phosphorothioate
  modified_base 14: mod_base = OTHER; note = 2'-deoxyadenosine-3'-phosphorothioate
  modified_base 15: mod_base = OTHER; note = 2'-deoxythymidine-3'-phosphorothioate
  modified_base 16: mod_base = OTHER; note = 2'-O-methyluridine-3'-phosphorothioate
  modified_base 17: mod_base = OTHER; note = 2'-O-methylguanosine-3'- phosphorothioate
  modified_base 18: mod_base = OTHER; note = 2'-O-methylguanosine-3'- phosphorothioate
  modified_base 19: mod_base = OTHER; note = 2'-O-methylcytidine-3'- phosphorothioate
  modified_base 20: mod_base = OTHER; note = 2'-O-methyladenosine-3'-phosphate
  misc_feature 1..5: note = RNA
  misc_feature 6..15: note = DNA
  misc_feature 16..20: note = RNA
agcccccacacatattggca

SEQ ID NO: 4177 - DNA, 20 bp, synthetic construct
  source 1..20: mol_type = other DNA
  modified_base 1: mod_base = OTHER; note = 2'-O-methylcytidine-3'- phosphorothioate
  modified_base 2: mod_base = OTHER; note = 2'-O-methyluridine-3'-phosphorothioate
  modified_base 3: mod_base = OTHER; note = 2'-O-methylguanosine-3'- phosphorothioate
  modified_base 4: mod_base = OTHER; note = 2'-O-methylcytidine-3'- phosphorothioate
  modified_base 5: mod_base = OTHER; note = 2'-O-methyladenosine-3'- phosphorothioate
  modified_base 6: mod_base = OTHER; note = 2'-deoxythymidine-3'-phosphorothioate
  modified_base 7: mod_base = OTHER; note = 2'-deoxyguanosine-3'-phosphorothioate
  modified_base 8: mod_base = OTHER; note = 2'-deoxyguanosine-3'-phosphorothioate
  modified_base 9: mod_base = OTHER; note = 5'-methyl-deoxycytidine-3'-phosphorothioate
  modified_base 10: mod_base = OTHER; note = 5'-methyl-deoxycytidine-3'-phosphorothioate
  modified_base 11: mod_base = OTHER; note = 2'-deoxyguanosine-3'-phosphorothioate
  modified_base 12: mod_base = OTHER; note = 2'-deoxythymidine-3'-phosphorothioate
  modified_base 13: mod_base = OTHER; note = 2'-deoxyadenosine-3'-phosphorothioate
  modified_base 14: mod_base = OTHER; note = 2'-deoxyguanosine-3'-phosphorothioate
  modified_base 15: mod_base = OTHER; note = 5'-methyl-deoxycytidine-3'-phosphorothioate
  modified_base 16: mod_base = OTHER; note = 2'-O-methylcytidine-3'- phosphorothioate
  modified_base 17: mod_base = OTHER; note = 2'-O-methylcytidine-3'- phosphorothioate
  modified_base 18: mod_base = OTHER; note = 2'-O-methylcytidine-3'- phosphorothioate
  modified_base 19: mod_base = OTHER; note = 2'-O-methylcytidine-3'- phosphorothioate
  modified_base 20: mod_base = OTHER; note = 2'-O-methyladenosine-3'-phosphate
  misc_feature 1..5: note = RNA
  misc_feature 6..15: note = DNA
  misc_feature 16..20: note = RNA
ctgcatggccgtagccccca

SEQ ID NO: 4178 - DNA, 20 bp, synthetic construct
  source 1..20: mol_type = other DNA
  modified_base 1: mod_base = OTHER; note = 2'-O-methylguanosine-3'- phosphorothioate
  modified_base 2: mod_base = OTHER; note = 2'-O-methyladenosine-3'- phosphorothioate
  modified_base 3: mod_base = OTHER; note = 2'-O-methylguanosine-3'- phosphorothioate
  modified_base 4: mod_base = OTHER; note = 2'-O-methylcytidine-3'- phosphorothioate
  modified_base 5: mod_base = OTHER; note = 2'-O-methylcytidine-3'- phosphorothioate
  modified_base 6: mod_base = OTHER; note = 2'-deoxyadenosine-3'-phosphorothioate
  modified_base 7: mod_base = OTHER; note = 2'-deoxythymidine-3'-phosphorothioate
  modified_base 8: mod_base = OTHER; note = 2'-deoxyguanosine-3'-phosphorothioate
  modified_base 9: mod_base = OTHER; note = 5'-methyl-deoxycytidine-3'-phosphorothioate
  modified_base 10: mod_base = OTHER; note = 2'-deoxyguanosine-3'-phosphorothioate
  modified_base 11: mod_base = OTHER; note = 5'-methyl-deoxycytidine-3'-phosphorothioate
  modified_base 12: mod_base = OTHER; note = 2'-deoxythymidine-3'-phosphorothioate
  modified_base 13: mod_base = OTHER; note = 2'-deoxyguanosine-3'-phosphorothioate
  modified_base 14: mod_base = OTHER; note = 5'-methyl-deoxycytidine-3'-phosphorothioate
  modified_base 15: mod_base = OTHER; note = 2'-deoxyadenosine-3'-phosphorothioate
  modified_base 16: mod_base = OTHER; note = 2'-O-methyluridine-3'-phosphorothioate
  modified_base 17: mod_base = OTHER; note = 2'-O-methylguanosine-3'- phosphorothioate
  modified_base 18: mod_base = OTHER; note = 2'-O-methylguanosine-3'- phosphorothioate
  modified_base 19: mod_base = OTHER; note = 2'-O-methylcytidine-3'- phosphorothioate
  modified_base 20: mod_base = OTHER; note = 2'-O-methylcytidine-3'-phosphate
  misc_feature 1..5: note = RNA
  misc_feature 6..15: note = DNA
  misc_feature 16..20: note = RNA
gagccatgcgctgcatggcc

SEQ ID NO: 4179 - DNA, 20 bp, synthetic construct
  source 1..20: mol_type = other DNA
  modified_base 1: mod_base = OTHER; note = 2'-O-methylguanosine-3'- phosphorothioate
  modified_base 2: mod_base = OTHER; note = 2'-O-methylcytidine-3'- phosphorothioate
  modified_base 3: mod_base = OTHER; note = 2'-O-methylcytidine-3'- phosphorothioate
  modified_base 4: mod_base = OTHER; note = 2'-O-methylguanosine-3'- phosphorothioate
  modified_base 5: mod_base = OTHER; note = 2'-O-methyluridine-3'-phosphorothioate
  modified_base 6: mod_base = OTHER; note = 5'-methyl-deoxycytidine-3'-phosphorothioate
  modified_base 7: mod_base = OTHER; note = 5'-methyl-deoxycytidine-3'-phosphorothioate
  modified_base 8: mod_base = OTHER; note = 2'-deoxyadenosine-3'-phosphorothioate
  modified_base 9: mod_base = OTHER; note = 5'-methyl-deoxycytidine-3'-phosphorothioate
  modified_base 10: mod_base = OTHER; note = 2'-deoxyadenosine-3'-phosphorothioate
  modified_base 11: mod_base = OTHER; note = 2'-deoxythymidine-3'-phosphorothioate
  modified_base 12: mod_base = OTHER; note = 2'-deoxyguanosine-3'-phosphorothioate
  modified_base 13: mod_base = OTHER; note = 2'-deoxyadenosine-3'-phosphorothioate
  modified_base 14: mod_base = OTHER; note = 2'-deoxyguanosine-3'-phosphorothioate
  modified_base 15: mod_base = OTHER; note = 5'-methyl-deoxycytidine-3'-phosphorothioate
  modified_base 16: mod_base = OTHER; note = 2'-O-methylcytidine-3'- phosphorothioate
  modified_base 17: mod_base = OTHER; note = 2'-O-methyladenosine-3'- phosphorothioate
  modified_base 18: mod_base = OTHER; note = 2'-O-methyluridine-3'-phosphorothioate
  modified_base 19: mod_base = OTHER; note = 2'-O-methylguanosine-3'- phosphorothioate
  modified_base 20: mod_base = OTHER; note = 2'-O-methylcytidine-3'-phosphate
  misc_feature 1..5: note = RNA
  misc_feature 6..15: note = DNA
  misc_feature 16..20: note = RNA
gccgtccacatgagccatgc

SEQ ID NO: 4180 - DNA, 20 bp, synthetic construct
  source 1..20: mol_type = other DNA
  modified_base 1: mod_base = OTHER; note = 2'-O-methyladenosine-3'- phosphorothioate
  modified_base 2: mod_base = OTHER; note = 2'-O-methylguanosine-3'- phosphorothioate
  modified_base 3: mod_base = OTHER; note = 2'-O-methyluridine-3'-phosphorothioate
  modified_base 4: mod_base = OTHER; note = 2'-O-methylguanosine-3'- phosphorothioate
  modified_base 5: mod_base = OTHER; note = 2'-O-methylguanosine-3'- phosphorothioate
  modified_base 6: mod_base = OTHER; note = 5'-methyl-deoxycytidine-3'-phosphorothioate
  modified_base 7: mod_base = OTHER; note = 2'-deoxyadenosine-3'-phosphorothioate
  modified_base 8: mod_base = OTHER; note = 2'-deoxyadenosine-3'-phosphorothioate
  modified_base 9: mod_base = OTHER; note = 2'-deoxyguanosine-3'-phosphorothioate
  modified_base 10: mod_base = OTHER; note = 5'-methyl-deoxycytidine-3'-phosphorothioate
  modified_base 11: mod_base = OTHER; note = 2'-deoxythymidine-3'-phosphorothioate
  modified_base 12: mod_base = OTHER; note = 5'-methyl-deoxycytidine-3'-phosphorothioate
  modified_base 13: mod_base = OTHER; note = 2'-deoxyguanosine-3'-phosphorothioate
  modified_base 14: mod_base = OTHER; note = 5'-methyl-deoxycytidine-3'-phosphorothioate
  modified_base 15: mod_base = OTHER; note = 5'-methyl-deoxycytidine-3'-phosphorothioate
  modified_base 16: mod_base = OTHER; note = 2'-O-methylguanosine-3'- phosphorothioate
  modified_base 17: mod_base = OTHER; note = 2'-O-methyluridine-3'-phosphorothioate
  modified_base 18: mod_base = OTHER; note = 2'-O-methylcytidine-3'- phosphorothioate
  modified_base 19: mod_base = OTHER; note = 2'-O-methylcytidine-3'- phosphorothioate
  modified_base 20: mod_base = OTHER; note = 2'-O-methyladenosine-3'-phosphate
  misc_feature 1..5: note = RNA
  misc_feature 6..15: note = DNA
  misc_feature 16..20: note = RNA
agtggcaagctcgccgtcca

SEQ ID NO: 4181 - DNA, 20 bp, synthetic construct
  source 1..20: mol_type = other DNA
  modified_base 1: mod_base = OTHER; note = 2'-O-methyladenosine-3'- phosphorothioate
  modified_base 2: mod_base = OTHER; note = 2'-O-methylcytidine-3'- phosphorothioate
  modified_base 3: mod_base = OTHER; note = 2'-O-methyladenosine-3'- phosphorothioate
  modified_base 4: mod_base = OTHER; note = 2'-O-methylguanosine-3'- phosphorothioate
  modified_base 5: mod_base = OTHER; note = 2'-O-methylguanosine-3'- phosphorothioate
  modified_base 6: mod_base = OTHER; note = 5'-methyl-deoxycytidine-3'-phosphorothioate
  modified_base 7: mod_base = OTHER; note = 2'-deoxythymidine-3'-phosphorothioate
  modified_base 8: mod_base = OTHER; note = 5'-methyl-deoxycytidine-3'-phosphorothioate
  modified_base 9: mod_base = OTHER; note = 2'-deoxythymidine-3'-phosphorothioate
  modified_base 10: mod_base = OTHER; note = 5'-methyl-deoxycytidine-3'-phosphorothioate
  modified_base 11: mod_base = OTHER; note = 2'-deoxyadenosine-3'-phosphorothioate
  modified_base 12: mod_base = OTHER; note = 5'-methyl-deoxycytidine-3'-phosphorothioate
  modified_base 13: mod_base = OTHER; note = 2'-deoxyadenosine-3'-phosphorothioate
  modified_base 14: mod_base = OTHER; note = 2'-deoxyguanosine-3'-phosphorothioate
  modified_base 15: mod_base = OTHER; note = 2'-deoxythymidine-3'-phosphorothioate
  modified_base 16: mod_base = OTHER; note = 2'-O-methylguanosine-3'- phosphorothioate
  modified_base 17: mod_base = OTHER; note = 2'-O-methylguanosine-3'- phosphorothioate
  modified_base 18: mod_base = OTHER; note = 2'-O-methylcytidine-3'- phosphorothioate
  modified_base 19: mod_base = OTHER; note = 2'-O-methyladenosine-3'- phosphorothioate
  modified_base 20: mod_base = OTHER; note = 2'-O-methyladenosine-3'-phosphate
  misc_feature 1..5: note = RNA
  misc_feature 6..15: note = DNA
  misc_feature 16..20: note = RNA
acaggctctcacagtggcaa

SEQ ID NO: 4182 - DNA, 20 bp, synthetic construct
  source 1..20: mol_type = other DNA
  modified_base 1: mod_base = OTHER; note = 2'-O-methylcytidine-3'- phosphorothioate
  modified_base 2: mod_base = OTHER; note = 2'-O-methyladenosine-3'- phosphorothioate
  modified_base 3: mod_base = OTHER; note = 2'-O-methylguanosine-3'- phosphorothioate
  modified_base 4: mod_base = OTHER; note = 2'-O-methylguanosine-3'- phosphorothioate
  modified_base 5: mod_base = OTHER; note = 2'-O-methylguanosine-3'- phosphorothioate
  modified_base 6: mod_base = OTHER; note = 2'-deoxyadenosine-3'-phosphorothioate
  modified_base 7: mod_base = OTHER; note = 5'-methyl-deoxycytidine-3'-phosphorothioate
  modified_base 8: mod_base = OTHER; note = 2'-deoxythymidine-3'-phosphorothioate
  modified_base 9: mod_base = OTHER; note = 2'-deoxyguanosine-3'-phosphorothioate
  modified_base 10: mod_base = OTHER; note = 2'-deoxyadenosine-3'-phosphorothioate
  modified_base 11: mod_base = OTHER; note = 5'-methyl-deoxycytidine-3'-phosphorothioate
  modified_base 12: mod_base = OTHER; note = 2'-deoxyadenosine-3'-phosphorothioate
  modified_base 13: mod_base = OTHER; note = 2'-deoxyguanosine-3'-phosphorothioate
  modified_base 14: mod_base = OTHER; note = 2'-deoxyguanosine-3'-phosphorothioate
  modified_base 15: mod_base = OTHER; note = 5'-methyl-deoxycytidine-3'-phosphorothioate
  modified_base 16: mod_base = OTHER; note = 2'-O-methyluridine-3'-phosphorothioate
  modified_base 17: mod_base = OTHER; note = 2'-O-methylcytidine-3'- phosphorothioate
  modified_base 18: mod_base = OTHER; note = 2'-O-methyluridine-3'-phosphorothioate
  modified_base 19: mod_base = OTHER; note = 2'-O-methylcytidine-3'- phosphorothioate
  modified_base 20: mod_base = OTHER; note = 2'-O-methyladenosine-3'-phosphate
  misc_feature 1..5: note = RNA
  misc_feature 6..15: note = DNA
  misc_feature 16..20: note = RNA
cagggactgacaggctctca

SEQ ID NO: 4183 - DNA, 20 bp, synthetic construct
  source 1..20: mol_type = other DNA
  modified_base 1: mod_base = OTHER; note = 2'-O-methyladenosine-3'- phosphorothioate
  modified_base 2: mod_base = OTHER; note = 2'-O-methyluridine-3'-phosphorothioate
  modified_base 3: mod_base = OTHER; note = 2'-O-methylguanosine-3'- phosphorothioate
  modified_base 4: mod_base = OTHER; note = 2'-O-methylcytidine-3'- phosphorothioate
  modified_base 5: mod_base = OTHER; note = 2'-O-methylcytidine-3'- phosphorothioate
  modified_base 6: mod_base = OTHER; note = 5'-methyl-deoxycytidine-3'-phosphorothioate
  modified_base 7: mod_base = OTHER; note = 2'-deoxyguanosine-3'-phosphorothioate
  modified_base 8: mod_base = OTHER; note = 2'-deoxythymidine-3'-phosphorothioate
  modified_base 9: mod_base = OTHER; note = 2'-deoxythymidine-3'-phosphorothioate
  modified_base 10: mod_base = OTHER; note = 5'-methyl-deoxycytidine-3'-phosphorothioate
  modified_base 11: mod_base = OTHER; note = 5'-methyl-deoxycytidine-3'-phosphorothioate
  modified_base 12: mod_base = OTHER; note = 5'-methyl-deoxycytidine-3'-phosphorothioate
  modified_base 13: mod_base = OTHER; note = 2'-deoxyadenosine-3'-phosphorothioate
  modified_base 14: mod_base = OTHER; note = 2'-deoxyguanosine-3'-phosphorothioate
  modified_base 15: mod_base = OTHER; note = 2'-deoxyguanosine-3'-phosphorothioate
  modified_base 16: mod_base = OTHER; note = 2'-O-methylguanosine-3'- phosphorothioate
  modified_base 17: mod_base = OTHER; note = 2'-O-methyladenosine-3'- phosphorothioate
  modified_base 18: mod_base = OTHER; note = 2'-O-methylcytidine-3'- phosphorothioate
  modified_base 19: mod_base = OTHER; note = 2'-O-methyluridine-3'-phosphorothioate
  modified_base 20: mod_base = OTHER; note = 2'-O-methylguanosine-3'-phosphate
  misc_feature 1..5: note = RNA
  misc_feature 6..15: note = DNA
  misc_feature 16..20: note = RNA
atgcccgttcccagggactg

SEQ ID NO: 4184 - DNA, 20 bp, synthetic construct
  source 1..20: mol_type = other DNA
  modified_base 1: mod_base = OTHER; note = 2'-O-methylguanosine-3'- phosphorothioate
  modified_base 2: mod_base = OTHER; note = 2'-O-methyladenosine-3'- phosphorothioate
  modified_base 3: mod_base = OTHER; note = 2'-O-methyladenosine-3'- phosphorothioate
  modified_base 4: mod_base = OTHER; note = 2'-O-methylcytidine-3'- phosphorothioate
  modified_base 5: mod_base = OTHER; note = 2'-O-methyluridine-3'-phosphorothioate
  modified_base 6: mod_base = OTHER; note = 5'-methyl-deoxycytidine-3'-phosphorothioate
  modified_base 7: mod_base = OTHER; note = 2'-deoxyadenosine-3'-phosphorothioate
  modified_base 8: mod_base = OTHER; note = 2'-deoxyadenosine-3'-phosphorothioate
  modified_base 9: mod_base = OTHER; note = 5'-methyl-deoxycytidine-3'-phosphorothioate
  modified_base 10: mod_base = OTHER; note = 2'-deoxyadenosine-3'-phosphorothioate
  modified_base 11: mod_base = OTHER; note = 2'-deoxythymidine-3'-phosphorothioate
  modified_base 12: mod_base = OTHER; note = 5'-methyl-deoxycytidine-3'-phosphorothioate
  modified_base 13: mod_base = OTHER; note = 2'-deoxyadenosine-3'-phosphorothioate
  modified_base 14: mod_base = OTHER; note = 2'-deoxythymidine-3'-phosphorothioate
  modified_base 15: mod_base = OTHER; note = 2'-deoxyguanosine-3'-phosphorothioate
  modified_base 16: mod_base = OTHER; note = 2'-O-methylcytidine-3'- phosphorothioate
  modified_base 17: mod_base = OTHER; note = 2'-O-methylcytidine-3'- phosphorothioate
  modified_base 18: mod_base = OTHER; note = 2'-O-methylcytidine-3'- phosphorothioate
  modified_base 19: mod_base = OTHER; note = 2'-O-methylguanosine-3'- phosphorothioate
  modified_base 20: mod_base = OTHER; note = 2'-O-methyluridine-3'-phosphate
  misc_feature 1..5: note = RNA
  misc_feature 6..15: note = DNA
  misc_feature 16..20: note = RNA
gaactcaacatcatgcccgt

SEQ ID NO: 4185 - DNA, 20 bp, synthetic construct
  source 1..20: mol_type = other DNA
  modified_base 1: mod_base = OTHER; note = 2'-O-methylguanosine-3'- phosphorothioate
  modified_base 2: mod_base = OTHER; note = 2'-O-methyladenosine-3'- phosphorothioate
  modified_base 3: mod_base = OTHER; note = 2'-O-methylguanosine-3'- phosphorothioate
  modified_base 4: mod_base = OTHER; note = 2'-O-methylguanosine-3'- phosphorothioate
  modified_base 5: mod_base = OTHER; note = 2'-O-methyluridine-3'-phosphorothioate
  modified_base 6: mod_base = OTHER; note = 2'-deoxyguanosine-3'-phosphorothioate
  modified_base 7: mod_base = OTHER; note = 2'-deoxyguanosine-3'-phosphorothioate
  modified_base 8: mod_base = OTHER; note = 5'-methyl-deoxycytidine-3'-phosphorothioate
  modified_base 9: mod_base = OTHER; note = 5'-methyl-deoxycytidine-3'-phosphorothioate
  modified_base 10: mod_base = OTHER; note = 5'-methyl-deoxycytidine-3'-phosphorothioate
  modified_base 11: mod_base = OTHER; note = 2'-deoxyadenosine-3'-phosphorothioate
  modified_base 12: mod_base = OTHER; note = 2'-deoxyguanosine-3'-phosphorothioate
  modified_base 13: mod_base = OTHER; note = 2'-deoxyguanosine-3'-phosphorothioate
  modified_base 14: mod_base = OTHER; note = 2'-deoxyadenosine-3'-phosphorothioate
  modified_base 15: mod_base = OTHER; note = 2'-deoxyadenosine-3'-phosphorothioate
  modified_base 16: mod_base = OTHER; note = 2'-O-methylcytidine-3'- phosphorothioate
  modified_base 17: mod_base = OTHER; note = 2'-O-methyluridine-3'-phosphorothioate
  modified_base 18: mod_base = OTHER; note = 2'-O-methylcytidine-3'- phosphorothioate
  modified_base 19: mod_base = OTHER; note = 2'-O-methyladenosine-3'- phosphorothioate
  modified_base 20: mod_base = OTHER; note = 2'-O-methyladenosine-3'-phosphate
  misc_feature 1..5: note = RNA
  misc_feature 6..15: note = DNA
  misc_feature 16..20: note = RNA
gaggtggcccaggaactcaa

SEQ ID NO: 4186 - DNA, 20 bp, synthetic construct
  source 1..20: mol_type = other DNA
  modified_base 1: mod_base = OTHER; note = 2'-O-methyluridine-3'-phosphorothioate
  modified_base 2: mod_base = OTHER; note = 2'-O-methylcytidine-3'- phosphorothioate
  modified_base 3: mod_base = OTHER; note = 2'-O-methyladenosine-3'- phosphorothioate
  modified_base 4: mod_base = OTHER; note = 2'-O-methyladenosine-3'- phosphorothioate
  modified_base 5: mod_base = OTHER; note = 2'-O-methyluridine-3'-phosphorothioate
  modified_base 6: mod_base = OTHER; note = 2'-deoxythymidine-3'-phosphorothioate
  modified_base 7: mod_base = OTHER; note = 2'-deoxyguanosine-3'-phosphorothioate
  modified_base 8: mod_base = OTHER; note = 2'-deoxyadenosine-3'-phosphorothioate
  modified_base 9: mod_base = OTHER; note = 2'-deoxyguanosine-3'-phosphorothioate
  modified_base 10: mod_base = OTHER; note = 2'-deoxyguanosine-3'-phosphorothioate
  modified_base 11: mod_base = OTHER; note = 2'-deoxyadenosine-3'-phosphorothioate
  modified_base 12: mod_base = OTHER; note = 2'-deoxyguanosine-3'-phosphorothioate
  modified_base 13: mod_base = OTHER; note = 2'-deoxyguanosine-3'-phosphorothioate
  modified_base 14: mod_base = OTHER; note = 2'-deoxythymidine-3'-phosphorothioate
  modified_base 15: mod_base = OTHER; note = 2'-deoxyguanosine-3'-phosphorothioate
  modified_base 16: mod_base = OTHER; note = 2'-O-methylguanosine-3'- phosphorothioate
  modified_base 17: mod_base = OTHER; note = 2'-O-methylcytidine-3'- phosphorothioate
  modified_base 18: mod_base = OTHER; note = 2'-O-methylcytidine-3'- phosphorothioate
  modified_base 19: mod_base = OTHER; note = 2'-O-methylcytidine-3'- phosphorothioate
  modified_base 20: mod_base = OTHER; note = 2'-O-methyladenosine-3'-phosphate
  misc_feature 1..5: note = RNA
  misc_feature 6..15: note = DNA
  misc_feature 16..20: note = RNA
tcaattgaggaggtggccca

SEQ ID NO: 4187 - DNA, 20 bp, synthetic construct
  source 1..20: mol_type = other DNA
  modified_base 1: mod_base = OTHER; note = 2'-O-methylcytidine-3'- phosphorothioate
  modified_base 2: mod_base = OTHER; note = 2'-O-methylcytidine-3'- phosphorothioate
  modified_base 3: mod_base = OTHER; note = 2'-O-methylguanosine-3'- phosphorothioate
  modified_base 4: mod_base = OTHER; note = 2'-O-methylcytidine-3'- phosphorothioate
  modified_base 5: mod_base = OTHER; note = 2'-O-methylcytidine-3'- phosphorothioate
  modified_base 6: mod_base = OTHER; note = 2'-deoxyadenosine-3'-phosphorothioate
  modified_base 7: mod_base = OTHER; note = 5'-methyl-deoxycytidine-3'-phosphorothioate
  modified_base 8: mod_base = OTHER; note = 2'-deoxythymidine-3'-phosphorothioate
  modified_base 9: mod_base = OTHER; note = 2'-deoxythymidine-3'-phosphorothioate
  modified_base 10: mod_base = OTHER; note = 5'-methyl-deoxycytidine-3'-phosphorothioate
  modified_base 11: mod_base = OTHER; note = 2'-deoxythymidine-3'-phosphorothioate
  modified_base 12: mod_base = OTHER; note = 2'-deoxythymidine-3'-phosphorothioate
  modified_base 13: mod_base = OTHER; note = 5'-methyl-deoxycytidine-3'-phosphorothioate
  modified_base 14: mod_base = OTHER; note = 2'-deoxyadenosine-3'-phosphorothioate
  modified_base 15: mod_base = OTHER; note = 2'-deoxyadenosine-3'-phosphorothioate
  modified_base 16: mod_base = OTHER; note = 2'-O-methyluridine-3'-phosphorothioate
  modified_base 17: mod_base = OTHER; note = 2'-O-methyluridine-3'-phosphorothioate
  modified_base 18: mod_base = OTHER; note = 2'-O-methylguanosine-3'- phosphorothioate
  modified_base 19: mod_base = OTHER; note = 2'-O-methyladenosine-3'- phosphorothioate
  modified_base 20: mod_base = OTHER; note = 2'-O-methylguanosine-3'-phosphate
  misc_feature 1..5: note = RNA
  misc_feature 6..15: note = DNA
  misc_feature 16..20: note = RNA
ccgccacttcttcaattgag

SEQ ID NO: 4188 - DNA, 20 bp, synthetic construct
  source 1..20: mol_type = other DNA
  modified_base 1: mod_base = OTHER; note = 2'-O-methylcytidine-3'- phosphorothioate
  modified_base 2: mod_base = OTHER; note = 2'-O-methyladenosine-3'- phosphorothioate
  modified_base 3: mod_base = OTHER; note = 2'-O-methylguanosine-3'- phosphorothioate
  modified_base 4: mod_base = OTHER; note = 2'-O-methylguanosine-3'- phosphorothioate
  modified_base 5: mod_base = OTHER; note = 2'-O-methyladenosine-3'- phosphorothioate
  modified_base 6: mod_base = OTHER; note = 5'-methyl-deoxycytidine-3'-phosphorothioate
  modified_base 7: mod_base = OTHER; note = 5'-methyl-deoxycytidine-3'-phosphorothioate
  modified_base 8: mod_base = OTHER; note = 2'-deoxyadenosine-3'-phosphorothioate
  modified_base 9: mod_base = OTHER; note = 2'-deoxyguanosine-3'-phosphorothioate
  modified_base 10: mod_base = OTHER; note = 5'-methyl-deoxycytidine-3'-phosphorothioate
  modified_base 11: mod_base = OTHER; note = 2'-deoxythymidine-3'-phosphorothioate
  modified_base 12: mod_base = OTHER; note = 2'-deoxythymidine-3'-phosphorothioate
  modified_base 13: mod_base = OTHER; note = 5'-methyl-deoxycytidine-3'-phosphorothioate
  modified_base 14: mod_base = OTHER; note = 5'-methyl-deoxycytidine-3'-phosphorothioate
  modified_base 15: mod_base = OTHER; note = 2'-deoxyguanosine-3'-phosphorothioate
  modified_base 16: mod_base = OTHER; note = 2'-O-methylcytidine-3'- phosphorothioate
  modified_base 17: mod_base = OTHER; note = 2'-O-methylcytidine-3'- phosphorothioate
  modified_base 18: mod_base = OTHER; note = 2'-O-methyladenosine-3'- phosphorothioate
  modified_base 19: mod_base = OTHER; note = 2'-O-methylcytidine-3'- phosphorothioate
  modified_base 20: mod_base = OTHER; note = 2'-O-methyluridine-3'-phosphate
  misc_feature 1..5: note = RNA
  misc_feature 6..15: note = DNA
  misc_feature 16..20: note = RNA
caggaccagcttccgccact

SEQ ID NO: 4189 - DNA, 20 bp, synthetic construct
  source 1..20: mol_type = other DNA
  modified_base 1: mod_base = OTHER; note = 2'-O-methyladenosine-3'- phosphorothioate
  modified_base 2: mod_base = OTHER; note = 2'-O-methylcytidine-3'- phosphorothioate
  modified_base 3: mod_base = OTHER; note = 2'-O-methylguanosine-3'- phosphorothioate
  modified_base 4: mod_base = OTHER; note = 2'-O-methyladenosine-3'- phosphorothioate
  modified_base 5: mod_base = OTHER; note = 2'-O-methyladenosine-3'- phosphorothioate
  modified_base 6: mod_base = OTHER; note = 2'-deoxyguanosine-3'-phosphorothioate
  modified_base 7: mod_base = OTHER; note = 2'-deoxythymidine-3'-phosphorothioate
  modified_base 8: mod_base = OTHER; note = 2'-deoxyguanosine-3'-phosphorothioate
  modified_base 9: mod_base = OTHER; note = 5'-methyl-deoxycytidine-3'-phosphorothioate
  modified_base 10: mod_base = OTHER; note = 5'-methyl-deoxycytidine-3'-phosphorothioate
  modified_base 11: mod_base = OTHER; note = 2'-deoxythymidine-3'-phosphorothioate
  modified_base 12: mod_base = OTHER; note = 5'-methyl-deoxycytidine-3'-phosphorothioate
  modified_base 13: mod_base = OTHER; note = 2'-deoxyadenosine-3'-phosphorothioate
  modified_base 14: mod_base = OTHER; note = 2'-deoxyguanosine-3'-phosphorothioate
  modified_base 15: mod_base = OTHER; note = 2'-deoxyguanosine-3'-phosphorothioate
  modified_base 16: mod_base = OTHER; note = 2'-O-methyladenosine-3'- phosphorothioate
  modified_base 17: mod_base = OTHER; note = 2'-O-methylcytidine-3'- phosphorothioate
  modified_base 18: mod_base = OTHER; note = 2'-O-methylcytidine-3'- phosphorothioate
  modified_base 19: mod_base = OTHER; note = 2'-O-methyladenosine-3'- phosphorothioate
  modified_base 20: mod_base = OTHER; note = 2'-O-methylguanosine-3'-phosphate
  misc_feature 1..5: note = RNA
  misc_feature 6..15: note = DNA
  misc_feature 16..20: note = RNA
acgaagtgcctcaggaccag

SEQ ID NO: 4190 - DNA, 20 bp, synthetic construct
  source 1..20: mol_type = other DNA
  modified_base 1: mod_base = OTHER; note = 2'-O-methylcytidine-3'- phosphorothioate
  modified_base 2: mod_base = OTHER; note = 2'-O-methyladenosine-3'- phosphorothioate
  modified_base 3: mod_base = OTHER; note = 2'-O-methylguanosine-3'- phosphorothioate
  modified_base 4: mod_base = OTHER; note = 2'-O-methyluridine-3'-phosphorothioate
  modified_base 5: mod_base = OTHER; note = 2'-O-methyluridine-3'-phosphorothioate
  modified_base 6: mod_base = OTHER; note = 2'-deoxyguanosine-3'-phosphorothioate
  modified_base 7: mod_base = OTHER; note = 5'-methyl-deoxycytidine-3'-phosphorothioate
  modified_base 8: mod_base = OTHER; note = 2'-deoxyadenosine-3'-phosphorothioate
  modified_base 9: mod_base = OTHER; note = 2'-deoxyguanosine-3'-phosphorothioate
  modified_base 10: mod_base = OTHER; note = 5'-methyl-deoxycytidine-3'-phosphorothioate
  modified_base 11: mod_base = OTHER; note = 5'-methyl-deoxycytidine-3'-phosphorothioate
  modified_base 12: mod_base = OTHER; note = 2'-deoxyadenosine-3'-phosphorothioate
  modified_base 13: mod_base = OTHER; note = 2'-deoxyadenosine-3'-phosphorothioate
  modified_base 14: mod_base = OTHER; note = 5'-methyl-deoxycytidine-3'-phosphorothioate
  modified_base 15: mod_base = OTHER; note = 2'-deoxyguanosine-3'-phosphorothioate
  modified_base 16: mod_base = OTHER; note = 2'-O-methyladenosine-3'- phosphorothioate
  modified_base 17: mod_base = OTHER; note = 2'-O-methyladenosine-3'- phosphorothioate
  modified_base 18: mod_base = OTHER; note = 2'-O-methylguanosine-3'- phosphorothioate
  modified_base 19: mod_base = OTHER; note = 2'-O-methyluridine-3'-phosphorothioate
  modified_base 20: mod_base = OTHER; note = 2'-O-methylguanosine-3'-phosphate
  misc_feature 1..5: note = RNA
  misc_feature 6..15: note = DNA
  misc_feature 16..20: note = RNA
cagttgcagccaacgaagtg

SEQ ID NO: 4191 - DNA, 20 bp, synthetic construct
  source 1..20: mol_type = other DNA
  modified_base 1: mod_base = OTHER; note = 2'-O-methyluridine-3'-phosphorothioate
  modified_base 2: mod_base = OTHER; note = 2'-O-methylguanosine-3'- phosphorothioate
  modified_base 3: mod_base = OTHER; note = 2'-O-methyluridine-3'-phosphorothioate
  modified_base 4: mod_base = OTHER; note = 2'-O-methyladenosine-3'- phosphorothioate
  modified_base 5: mod_base = OTHER; note = 2'-O-methylguanosine-3'- phosphorothioate
  modified_base 6: mod_base = OTHER; note = 2'-deoxyadenosine-3'-phosphorothioate
  modified_base 7: mod_base = OTHER; note = 2'-deoxythymidine-3'-phosphorothioate
  modified_base 8: mod_base = OTHER; note = 2'-deoxyadenosine-3'-phosphorothioate
  modified_base 9: mod_base = OTHER; note = 2'-deoxythymidine-3'-phosphorothioate
  modified_base 10: mod_base = OTHER; note = 2'-deoxyadenosine-3'-phosphorothioate
  modified_base 11: mod_base = OTHER; note = 5'-methyl-deoxycytidine-3'-phosphorothioate
  modified_base 12: mod_base = OTHER; note = 2'-deoxyadenosine-3'-phosphorothioate
  modified_base 13: mod_base = OTHER; note = 2'-deoxyguanosine-3'-phosphorothioate
  modified_base 14: mod_base = OTHER; note = 2'-deoxythymidine-3'-phosphorothioate
  modified_base 15: mod_base = OTHER; note = 2'-deoxythymidine-3'-phosphorothioate
  modified_base 16: mod_base = OTHER; note = 2'-O-methylguanosine-3'- phosphorothioate
  modified_base 17: mod_base = OTHER; note = 2'-O-methylcytidine-3'- phosphorothioate
  modified_base 18: mod_base = OTHER; note = 2'-O-methyladenosine-3'- phosphorothioate
  modified_base 19: mod_base = OTHER; note = 2'-O-methylguanosine-3'- phosphorothioate
  modified_base 20: mod_base = OTHER; note = 2'-O-methylcytidine-3'-phosphate
  misc_feature 1..5: note = RNA
  misc_feature 6..15: note = DNA
  misc_feature 16..20: note = RNA
tgtagatatacagttgcagc

SEQ ID NO: 4192 - DNA, 20 bp, synthetic construct
  source 1..20: mol_type = other DNA
  modified_base 1: mod_base = OTHER; note = 2'-O-methyluridine-3'-phosphorothioate
  modified_base 2: mod_base = OTHER; note = 2'-O-methylcytidine-3'- phosphorothioate
  modified_base 3: mod_base = OTHER; note = 2'-O-methyluridine-3'-phosphorothioate
  modified_base 4: mod_base = OTHER; note = 2'-O-methylcytidine-3'- phosphorothioate
  modified_base 5: mod_base = OTHER; note = 2'-O-methylguanosine-3'- phosphorothioate
  modified_base 6: mod_base = OTHER; note = 2'-deoxyguanosine-3'-phosphorothioate
  modified_base 7: mod_base = OTHER; note = 2'-deoxythymidine-3'-phosphorothioate
  modified_base 8: mod_base = OTHER; note = 5'-methyl-deoxycytidine-3'-phosphorothioate
  modified_base 9: mod_base = OTHER; note = 5'-methyl-deoxycytidine-3'-phosphorothioate
  modified_base 10: mod_base = OTHER; note = 2'-deoxythymidine-3'-phosphorothioate
  modified_base 11: mod_base = OTHER; note = 2'-deoxythymidine-3'-phosphorothioate
  modified_base 12: mod_base = OTHER; note = 2'-deoxyguanosine-3'-phosphorothioate
  modified_base 13: mod_base = OTHER; note = 2'-deoxythymidine-3'-phosphorothioate
  modified_base 14: mod_base = OTHER; note = 2'-deoxyadenosine-3'-phosphorothioate
  modified_base 15: mod_base = OTHER; note = 2'-deoxyguanosine-3'-phosphorothioate
  modified_base 16: mod_base = OTHER; note = 2'-O-methyladenosine-3'- phosphorothioate
  modified_base 17: mod_base = OTHER; note = 2'-O-methyluridine-3'-phosphorothioate
  modified_base 18: mod_base = OTHER; note = 2'-O-methyladenosine-3'- phosphorothioate
  modified_base 19: mod_base = OTHER; note = 2'-O-methyluridine-3'-phosphorothioate
  modified_base 20: mod_base = OTHER; note = 2'-O-methyladenosine-3'-phosphate
  misc_feature 1..5: note = RNA
  misc_feature 6..15: note = DNA
  misc_feature 16..20: note = RNA
tctcggtccttgtagatata

SEQ ID NO: 4193 - DNA, 20 bp, synthetic construct
  source 1..20: mol_type = other DNA
  modified_base 1: mod_base = OTHER; note = 2'-O-methyluridine-3'-phosphorothioate
  modified_base 2: mod_base = OTHER; note = 2'-O-methyluridine-3'-phosphorothioate
  modified_base 3: mod_base = OTHER; note = 2'-O-methylcytidine-3'- phosphorothioate
  modified_base 4: mod_base = OTHER; note = 2'-O-methyluridine-3'-phosphorothioate
  modified_base 5: mod_base = OTHER; note = 2'-O-methyluridine-3'-phosphorothioate
  modified_base 6: mod_base = OTHER; note = 2'-deoxyguanosine-3'-phosphorothioate
  modified_base 7: mod_base = OTHER; note = 2'-deoxyguanosine-3'-phosphorothioate
  modified_base 8: mod_base = OTHER; note = 2'-deoxythymidine-3'-phosphorothioate
  modified_base 9: mod_base = OTHER; note = 2'-deoxyguanosine-3'-phosphorothioate
  modified_base 10: mod_base = OTHER; note = 2'-deoxyadenosine-3'-phosphorothioate
  modified_base 11: mod_base = OTHER; note = 5'-methyl-deoxycytidine-3'-phosphorothioate
  modified_base 12: mod_base = OTHER; note = 2'-deoxythymidine-3'-phosphorothioate
  modified_base 13: mod_base = OTHER; note = 2'-deoxythymidine-3'-phosphorothioate
  modified_base 14: mod_base = OTHER; note = 5'-methyl-deoxycytidine-3'-phosphorothioate
  modified_base 15: mod_base = OTHER; note = 2'-deoxythymidine-3'-phosphorothioate
  modified_base 16: mod_base = OTHER; note = 2'-O-methylcytidine-3'- phosphorothioate
  modified_base 17: mod_base = OTHER; note = 2'-O-methylguanosine-3'- phosphorothioate
  modified_base 18: mod_base = OTHER; note = 2'-O-methylguanosine-3'- phosphorothioate
  modified_base 19: mod_base = OTHER; note = 2'-O-methyluridine-3'-phosphorothioate
  modified_base 20: mod_base = OTHER; note = 2'-O-methylcytidine-3'-phosphate
  misc_feature 1..5: note = RNA
  misc_feature 6..15: note = DNA
  misc_feature 16..20: note = RNA
ttcttggtgacttctcggtc

SEQ ID NO: 4194 - DNA, 20 bp, synthetic construct
  source 1..20: mol_type = other DNA
  modified_base 1: mod_base = OTHER; note = 2'-O-methylcytidine-3'- phosphorothioate
  modified_base 2: mod_base = OTHER; note = 2'-O-methylcytidine-3'- phosphorothioate
  modified_base 3: mod_base = OTHER; note = 2'-O-methylguanosine-3'- phosphorothioate
  modified_base 4: mod_base = OTHER; note = 2'-O-methylcytidine-3'- phosphorothioate
  modified_base 5: mod_base = OTHER; note = 2'-O-methyladenosine-3'- phosphorothioate
  modified_base 6: mod_base = OTHER; note = 5'-methyl-deoxycytidine-3'-phosphorothioate
  modified_base 7: mod_base = OTHER; note = 2'-deoxythymidine-3'-phosphorothioate
  modified_base 8: mod_base = OTHER; note = 2'-deoxyadenosine-3'-phosphorothioate
  modified_base 9: mod_base = OTHER; note = 2'-deoxyguanosine-3'-phosphorothioate
  modified_base 10: mod_base = OTHER; note = 5'-methyl-deoxycytidine-3'-phosphorothioate
  modified_base 11: mod_base = OTHER; note = 2'-deoxythymidine-3'-phosphorothioate
  modified_base 12: mod_base = OTHER; note = 2'-deoxythymidine-3'-phosphorothioate
  modified_base 13: mod_base = OTHER; note = 5'-methyl-deoxycytidine-3'-phosphorothioate
  modified_base 14: mod_base = OTHER; note = 2'-deoxythymidine-3'-phosphorothioate
  modified_base 15: mod_base = OTHER; note = 2'-deoxythymidine-3'-phosphorothioate
  modified_base 16: mod_base = OTHER; note = 2'-O-methylguanosine-3'- phosphorothioate
  modified_base 17: mod_base = OTHER; note = 2'-O-methylguanosine-3'- phosphorothioate
  modified_base 18: mod_base = OTHER; note = 2'-O-methyluridine-3'-phosphorothioate
  modified_base 19: mod_base = OTHER; note = 2'-O-methylguanosine-3'- phosphorothioate
  modified_base 20: mod_base = OTHER; note = 2'-O-methyladenosine-3'-phosphate
  misc_feature 1..5: note = RNA
  misc_feature 6..15: note = DNA
  misc_feature 16..20: note = RNA
ccgcactagcttcttggtga

SEQ ID NO: 4195 - DNA, 20 bp, synthetic construct
  source 1..20: mol_type = other DNA
  modified_base 1: mod_base = OTHER; note = 2'-O-methylcytidine-3'- phosphorothioate
  modified_base 2: mod_base = OTHER; note = 2'-O-methyluridine-3'-phosphorothioate
  modified_base 3: mod_base = OTHER; note = 2'-O-methyluridine-3'-phosphorothioate
  modified_base 4: mod_base = OTHER; note = 2'-O-methylcytidine-3'- phosphorothioate
  modified_base 5: mod_base = OTHER; note = 2'-O-methyluridine-3'-phosphorothioate
  modified_base 6: mod_base = OTHER; note = 5'-methyl-deoxycytidine-3'-phosphorothioate
  modified_base 7: mod_base = OTHER; note = 2'-deoxythymidine-3'-phosphorothioate
  modified_base 8: mod_base = OTHER; note = 2'-deoxyguanosine-3'-phosphorothioate
  modified_base 9: mod_base = OTHER; note = 5'-methyl-deoxycytidine-3'-phosphorothioate
  modified_base 10: mod_base = OTHER; note = 5'-methyl-deoxycytidine-3'-phosphorothioate
  modified_base 11: mod_base = OTHER; note = 2'-deoxythymidine-3'-phosphorothioate
  modified_base 12: mod_base = OTHER; note = 2'-deoxyguanosine-3'-phosphorothioate
  modified_base 13: mod_base = OTHER; note = 5'-methyl-deoxycytidine-3'-phosphorothioate
  modified_base 14: mod_base = OTHER; note = 5'-methyl-deoxycytidine-3'-phosphorothioate
  modified_base 15: mod_base = OTHER; note = 2'-deoxyguanosine-3'-phosphorothioate
  modified_base 16: mod_base = OTHER; note = 2'-O-methylcytidine-3'- phosphorothioate
  modified_base 17: mod_base = OTHER; note = 2'-O-methyladenosine-3'- phosphorothioate
  modified_base 18: mod_base = OTHER; note = 2'-O-methylcytidine-3'- phosphorothioate
  modified_base 19: mod_base = OTHER; note = 2'-O-methyluridine-3'-phosphorothioate
  modified_base 20: mod_base = OTHER; note = 2'-O-methyladenosine-3'-phosphate
  misc_feature 1..5: note = RNA
  misc_feature 6..15: note = DNA
  misc_feature 16..20: note = RNA
cttctctgcctgccgcacta

SEQ ID NO: 4196 - DNA, 20 bp, synthetic construct
  source 1..20: mol_type = other DNA
  modified_base 1: mod_base = OTHER; note = 2'-O-methylcytidine-3'- phosphorothioate
  modified_base 2: mod_base = OTHER; note = 2'-O-methyluridine-3'-phosphorothioate
  modified_base 3: mod_base = OTHER; note = 2'-O-methyluridine-3'-phosphorothioate
  modified_base 4: mod_base = OTHER; note = 2'-O-methylguanosine-3'- phosphorothioate
  modified_base 5: mod_base = OTHER; note = 2'-O-methyluridine-3'-phosphorothioate
  modified_base 6: mod_base = OTHER; note = 2'-deoxyadenosine-3'-phosphorothioate
  modified_base 7: mod_base = OTHER; note = 2'-deoxyguanosine-3'-phosphorothioate
  modified_base 8: mod_base = OTHER; note = 5'-methyl-deoxycytidine-3'-phosphorothioate
  modified_base 9: mod_base = OTHER; note = 5'-methyl-deoxycytidine-3'-phosphorothioate
  modified_base 10: mod_base = OTHER; note = 5'-methyl-deoxycytidine-3'-phosphorothioate
  modified_base 11: mod_base = OTHER; note = 2'-deoxyadenosine-3'-phosphorothioate
  modified_base 12: mod_base = OTHER; note = 2'-deoxythymidine-3'-phosphorothioate
  modified_base 13: mod_base = OTHER; note = 5'-methyl-deoxycytidine-3'-phosphorothioate
  modified_base 14: mod_base = OTHER; note = 2'-deoxythymidine-3'-phosphorothioate
  modified_base 15: mod_base = OTHER; note = 2'-deoxythymidine-3'-phosphorothioate
  modified_base 16: mod_base = OTHER; note = 2'-O-methylcytidine-3'- phosphorothioate
  modified_base 17: mod_base = OTHER; note = 2'-O-methyluridine-3'-phosphorothioate
  modified_base 18: mod_base = OTHER; note = 2'-O-methylcytidine-3'- phosphorothioate
  modified_base 19: mod_base = OTHER; note = 2'-O-methyluridine-3'-phosphorothioate
  modified_base 20: mod_base = OTHER; note = 2'-O-methylguanosine-3'-phosphate
  misc_feature 1..5: note = RNA
  misc_feature 6..15: note = DNA
  misc_feature 16..20: note = RNA
cttgtagcccatcttctctg

SEQ ID NO: 4197 - DNA, 20 bp, synthetic construct
  source 1..20: mol_type = other DNA
  modified_base 1: mod_base = OTHER; note = 2'-O-methyladenosine-3'- phosphorothioate
  modified_base 2: mod_base = OTHER; note = 2'-O-methyladenosine-3'- phosphorothioate
  modified_base 3: mod_base = OTHER; note = 2'-O-methyladenosine-3'- phosphorothioate
  modified_base 4: mod_base = OTHER; note = 2'-O-methyluridine-3'-phosphorothioate
  modified_base 5: mod_base = OTHER; note = 2'-O-methyladenosine-3'- phosphorothioate
  modified_base 6: mod_base = OTHER; note = 2'-deoxythymidine-3'-phosphorothioate
  modified_base 7: mod_base = OTHER; note = 2'-deoxyguanosine-3'-phosphorothioate
  modified_base 8: mod_base = OTHER; note = 2'-deoxyguanosine-3'-phosphorothioate
  modified_base 9: mod_base = OTHER; note = 5'-methyl-deoxycytidine-3'-phosphorothioate
  modified_base 10: mod_base = OTHER; note = 5'-methyl-deoxycytidine-3'-phosphorothioate
  modified_base 11: mod_base = OTHER; note = 2'-deoxythymidine-3'-phosphorothioate
  modified_base 12: mod_base = OTHER; note = 2'-deoxythymidine-3'-phosphorothioate
  modified_base 13: mod_base = OTHER; note = 2'-deoxyguanosine-3'-phosphorothioate
  modified_base 14: mod_base = OTHER; note = 2'-deoxythymidine-3'-phosphorothioate
  modified_base 15: mod_base = OTHER; note = 2'-deoxyadenosine-3'-phosphorothioate
  modified_base 16: mod_base = OTHER; note = 2'-O-methylguanosine-3'- phosphorothioate
  modified_base 17: mod_base = OTHER; note = 2'-O-methylcytidine-3'- phosphorothioate
  modified_base 18: mod_base = OTHER; note = 2'-O-methylcytidine-3'- phosphorothioate
  modified_base 19: mod_base = OTHER; note = 2'-O-methylcytidine-3'- phosphorothioate
  modified_base 20: mod_base = OTHER; note = 2'-O-methyladenosine-3'-phosphate
  misc_feature 1..5: note = RNA
  misc_feature 6..15: note = DNA
  misc_feature 16..20: note = RNA
aaatatggccttgtagccca

SEQ ID NO: 4198 - DNA, 20 bp, synthetic construct
  source 1..20: mol_type = other DNA
  modified_base 1: mod_base = OTHER; note = 2'-O-methyluridine-3'-phosphorothioate
  modified_base 2: mod_base = OTHER; note = 2'-O-methylguanosine-3'- phosphorothioate
  modified_base 3: mod_base = OTHER; note = 2'-O-methyluridine-3'-phosphorothioate
  modified_base 4: mod_base = OTHER; note = 2'-O-methylcytidine-3'- phosphorothioate
  modified_base 5: mod_base = OTHER; note = 2'-O-methylcytidine-3'- phosphorothioate
  modified_base 6: mod_base = OTHER; note = 2'-deoxyadenosine-3'-phosphorothioate
  modified_base 7: mod_base = OTHER; note = 5'-methyl-deoxycytidine-3'-phosphorothioate
  modified_base 8: mod_base = OTHER; note = 2'-deoxythymidine-3'-phosphorothioate
  modified_base 9: mod_base = OTHER; note = 2'-deoxyguanosine-3'-phosphorothioate
  modified_base 10: mod_base = OTHER; note = 2'-deoxythymidine-3'-phosphorothioate
  modified_base 11: mod_base = OTHER; note = 5'-methyl-deoxycytidine-3'-phosphorothioate
  modified_base 12: mod_base = OTHER; note = 2'-deoxyadenosine-3'-phosphorothioate
  modified_base 13: mod_base = OTHER; note = 5'-methyl-deoxycytidine-3'-phosphorothioate
  modified_base 14: mod_base = OTHER; note = 2'-deoxyadenosine-3'-phosphorothioate
  modified_base 15: mod_base = OTHER; note = 2'-deoxyadenosine-3'-phosphorothioate
  modified_base 16: mod_base = OTHER; note = 2'-O-methyladenosine-3'- phosphorothioate
  modified_base 17: mod_base = OTHER; note = 2'-O-methyluridine-3'-phosphorothioate
  modified_base 18: mod_base = OTHER; note = 2'-O-methyladenosine-3'- phosphorothioate
  modified_base 19: mod_base = OTHER; note = 2'-O-methyluridine-3'-phosphorothioate
  modified_base 20: mod_base = OTHER; note = 2'-O-methylguanosine-3'-phosphate
  misc_feature 1..5: note = RNA
  misc_feature 6..15: note = DNA
  misc_feature 16..20: note = RNA
tgtccactgtcacaaatatg

SEQ ID NO: 4199 - DNA, 20 bp, synthetic construct
  source 1..20: mol_type = other DNA
  modified_base 1: mod_base = OTHER; note = 2'-O-methylcytidine-3'- phosphorothioate
  modified_base 2: mod_base = OTHER; note = 2'-O-methyladenosine-3'- phosphorothioate
  modified_base 3: mod_base = OTHER; note = 2'-O-methylguanosine-3'- phosphorothioate
  modified_base 4: mod_base = OTHER; note = 2'-O-methylguanosine-3'- phosphorothioate
  modified_base 5: mod_base = OTHER; note = 2'-O-methyluridine-3'-phosphorothioate
  modified_base 6: mod_base = OTHER; note = 2'-deoxyadenosine-3'-phosphorothioate
  modified_base 7: mod_base = OTHER; note = 2'-deoxyadenosine-3'-phosphorothioate
  modified_base 8: mod_base = OTHER; note = 2'-deoxyguanosine-3'-phosphorothioate
  modified_base 9: mod_base = OTHER; note = 2'-deoxyguanosine-3'-phosphorothioate
  modified_base 10: mod_base = OTHER; note = 2'-deoxythymidine-3'-phosphorothioate
  modified_base 11: mod_base = OTHER; note = 2'-deoxyguanosine-3'-phosphorothioate
  modified_base 12: mod_base = OTHER; note = 2'-deoxythymidine-3'-phosphorothioate
  modified_base 13: mod_base = OTHER; note = 2'-deoxyguanosine-3'-phosphorothioate
  modified_base 14: mod_base = OTHER; note = 2'-deoxythymidine-3'-phosphorothioate
  modified_base 15: mod_base = OTHER; note = 5'-methyl-deoxycytidine-3'-phosphorothioate
  modified_base 16: mod_base = OTHER; note = 2'-O-methylcytidine-3'- phosphorothioate
  modified_base 17: mod_base = OTHER; note = 2'-O-methyladenosine-3'- phosphorothioate
  modified_base 18: mod_base = OTHER; note = 2'-O-methylcytidine-3'- phosphorothioate
  modified_base 19: mod_base = OTHER; note = 2'-O-methyluridine-3'-phosphorothioate
  modified_base 20: mod_base = OTHER; note = 2'-O-methylguanosine-3'-phosphate
  misc_feature 1..5: note = RNA
  misc_feature 6..15: note = DNA
  misc_feature 16..20: note = RNA
caggtaaggtgtgtccactg

SEQ ID NO: 4200 - DNA, 20 bp, synthetic construct
  source 1..20: mol_type = other DNA
  modified_base 1: mod_base = OTHER; note = 2'-O-methylguanosine-3'- phosphorothioate
  modified_base 2: mod_base = OTHER; note = 2'-O-methyladenosine-3'- phosphorothioate
  modified_base 3: mod_base = OTHER; note = 2'-O-methylcytidine-3'- phosphorothioate
  modified_base 4: mod_base = OTHER; note = 2'-O-methylguanosine-3'- phosphorothioate
  modified_base 5: mod_base = OTHER; note = 2'-O-methylguanosine-3'- phosphorothioate
  modified_base 6: mod_base = OTHER; note = 2'-deoxythymidine-3'-phosphorothioate
  modified_base 7: mod_base = OTHER; note = 2'-deoxythymidine-3'-phosphorothioate
  modified_base 8: mod_base = OTHER; note = 2'-deoxyguanosine-3'-phosphorothioate
  modified_base 9: mod_base = OTHER; note = 5'-methyl-deoxycytidine-3'-phosphorothioate
  modified_base 10: mod_base = OTHER; note = 5'-methyl-deoxycytidine-3'-phosphorothioate
  modified_base 11: mod_base = OTHER; note = 5'-methyl-deoxycytidine-3'-phosphorothioate
  modified_base 12: mod_base = OTHER; note = 2'-deoxyadenosine-3'-phosphorothioate
  modified_base 13: mod_base = OTHER; note = 2'-deoxyguanosine-3'-phosphorothioate
  modified_base 14: mod_base = OTHER; note = 2'-deoxyguanosine-3'-phosphorothioate
  modified_base 15: mod_base = OTHER; note = 2'-deoxythymidine-3'-phosphorothioate
  modified_base 16: mod_base = OTHER; note = 2'-O-methyladenosine-3'- phosphorothioate
  modified_base 17: mod_base = OTHER; note = 2'-O-methyladenosine-3'- phosphorothioate
  modified_base 18: mod_base = OTHER; note = 2'-O-methylguanosine-3'- phosphorothioate
  modified_base 19: mod_base = OTHER; note = 2'-O-methylguanosine-3'- phosphorothioate
  modified_base 20: mod_base = OTHER; note = 2'-O-methyluridine-3'-phosphate
  misc_feature 1..5: note = RNA
  misc_feature 6..15: note = DNA
  misc_feature 16..20: note = RNA
gacggttgcccaggtaaggt

SEQ ID NO: 4201 - DNA, 20 bp, synthetic construct
  source 1..20: mol_type = other DNA
  modified_base 1: mod_base = OTHER; note = 2'-O-methylcytidine-3'- phosphorothioate
  modified_base 2: mod_base = OTHER; note = 2'-O-methyladenosine-3'- phosphorothioate
  modified_base 3: mod_base = OTHER; note = 2'-O-methylcytidine-3'- phosphorothioate
  modified_base 4: mod_base = OTHER; note = 2'-O-methyladenosine-3'- phosphorothioate
  modified_base 5: mod_base = OTHER; note = 2'-O-methyluridine-3'-phosphorothioate
  modified_base 6: mod_base = OTHER; note = 5'-methyl-deoxycytidine-3'-phosphorothioate
  modified_base 7: mod_base = OTHER; note = 2'-deoxyadenosine-3'-phosphorothioate
  modified_base 8: mod_base = OTHER; note = 2'-deoxythymidine-3'-phosphorothioate
  modified_base 9: mod_base = OTHER; note = 5'-methyl-deoxycytidine-3'-phosphorothioate
  modified_base 10: mod_base = OTHER; note = 5'-methyl-deoxycytidine-3'-phosphorothioate
  modified_base 11: mod_base = OTHER; note = 2'-deoxyadenosine-3'-phosphorothioate
  modified_base 12: mod_base = OTHER; note = 2'-deoxyguanosine-3'-phosphorothioate
  modified_base 13: mod_base = OTHER; note = 2'-deoxyadenosine-3'-phosphorothioate
  modified_base 14: mod_base = OTHER; note = 5'-methyl-deoxycytidine-3'-phosphorothioate
  modified_base 15: mod_base = OTHER; note = 2'-deoxyguanosine-3'-phosphorothioate
  modified_base 16: mod_base = OTHER; note = 2'-O-methylguanosine-3'- phosphorothioate
  modified_base 17: mod_base = OTHER; note = 2'-O-methyluridine-3'-phosphorothioate
  modified_base 18: mod_base = OTHER; note = 2'-O-methyluridine-3'-phosphorothioate
  modified_base 19: mod_base = OTHER; note = 2'-O-methylguanosine-3'- phosphorothioate
  modified_base 20: mod_base = OTHER; note = 2'-O-methylcytidine-3'-phosphate
  misc_feature 1..5: note = RNA
  misc_feature 6..15: note = DNA
  misc_feature 16..20: note = RNA
cacatcatccagacggttgc

SEQ ID NO: 4202 - DNA, 20 bp, synthetic construct
  source 1..20: mol_type = other DNA
  modified_base 1: mod_base = OTHER; note = 2'-O-methyladenosine-3'- phosphorothioate
  modified_base 2: mod_base = OTHER; note = 2'-O-methyladenosine-3'- phosphorothioate
  modified_base 3: mod_base = OTHER; note = 2'-O-methyluridine-3'-phosphorothioate
  modified_base 4: mod_base = OTHER; note = 2'-O-methylcytidine-3'- phosphorothioate
  modified_base 5: mod_base = OTHER; note = 2'-O-methyluridine-3'-phosphorothioate
  modified_base 6: mod_base = OTHER; note = 2'-deoxyguanosine-3'-phosphorothioate
  modified_base 7: mod_base = OTHER; note = 2'-deoxythymidine-3'-phosphorothioate
  modified_base 8: mod_base = OTHER; note = 2'-deoxythymidine-3'-phosphorothioate
  modified_base 9: mod_base = OTHER; note = 2'-deoxyadenosine-3'-phosphorothioate
  modified_base 10: mod_base = OTHER; note = 5'-methyl-deoxycytidine-3'-phosphorothioate
  modified_base 11: mod_base = OTHER; note = 2'-deoxyguanosine-3'-phosphorothioate
  modified_base 12: mod_base = OTHER; note = 5'-methyl-deoxycytidine-3'-phosphorothioate
  modified_base 13: mod_base = OTHER; note = 2'-deoxyadenosine-3'-phosphorothioate
  modified_base 14: mod_base = OTHER; note = 5'-methyl-deoxycytidine-3'-phosphorothioate
  modified_base 15: mod_base = OTHER; note = 2'-deoxyadenosine-3'-phosphorothioate
  modified_base 16: mod_base = OTHER; note = 2'-O-methyluridine-3'-phosphorothioate
  modified_base 17: mod_base = OTHER; note = 2'-O-methylcytidine-3'- phosphorothioate
  modified_base 18: mod_base = OTHER; note = 2'-O-methyladenosine-3'- phosphorothioate
  modified_base 19: mod_base = OTHER; note = 2'-O-methyluridine-3'-phosphorothioate
  modified_base 20: mod_base = OTHER; note = 2'-O-methylcytidine-3'-phosphate
  misc_feature 1..5: note = RNA
  misc_feature 6..15: note = DNA
  misc_feature 16..20: note = RNA
aatctgttacgcacatcatc

SEQ ID NO: 4203 - DNA, 20 bp, synthetic construct
  source 1..20: mol_type = other DNA
  modified_base 1: mod_base = OTHER; note = 2'-O-methylguanosine-3'- phosphorothioate
  modified_base 2: mod_base = OTHER; note = 2'-O-methylcytidine-3'- phosphorothioate
  modified_base 3: mod_base = OTHER; note = 2'-O-methylguanosine-3'- phosphorothioate
  modified_base 4: mod_base = OTHER; note = 2'-O-methylguanosine-3'- phosphorothioate
  modified_base 5: mod_base = OTHER; note = 2'-O-methylcytidine-3'- phosphorothioate
  modified_base 6: mod_base = OTHER; note = 2'-deoxyadenosine-3'-phosphorothioate
  modified_base 7: mod_base = OTHER; note = 2'-deoxyguanosine-3'-phosphorothioate
  modified_base 8: mod_base = OTHER; note = 2'-deoxythymidine-3'-phosphorothioate
  modified_base 9: mod_base = OTHER; note = 2'-deoxythymidine-3'-phosphorothioate
  modified_base 10: mod_base = OTHER; note = 2'-deoxythymidine-3'-phosphorothioate
  modified_base 11: mod_base = OTHER; note = 2'-deoxyguanosine-3'-phosphorothioate
  modified_base 12: mod_base = OTHER; note = 2'-deoxyadenosine-3'-phosphorothioate
  modified_base 13: mod_base = OTHER; note = 2'-deoxyadenosine-3'-phosphorothioate
  modified_base 14: mod_base = OTHER; note = 2'-deoxythymidine-3'-phosphorothioate
  modified_base 15: mod_base = OTHER; note = 5'-methyl-deoxycytidine-3'-phosphorothioate
  modified_base 16: mod_base = OTHER; note = 2'-O-methyluridine-3'-phosphorothioate
  modified_base 17: mod_base = OTHER; note = 2'-O-methylguanosine-3'- phosphorothioate
  modified_base 18: mod_base = OTHER; note = 2'-O-methyluridine-3'-phosphorothioate
  modified_base 19: mod_base = OTHER; note = 2'-O-methyluridine-3'-phosphorothioate
  modified_base 20: mod_base = OTHER; note = 2'-O-methyladenosine-3'-phosphate
  misc_feature 1..5: note = RNA
  misc_feature 6..15: note = DNA
  misc_feature 16..20: note = RNA
gcggcagtttgaatctgtta

SEQ ID NO: 4204 - DNA, 20 bp, synthetic construct
  source 1..20: mol_type = other DNA
  modified_base 1: mod_base = OTHER; note = 2'-O-methylcytidine-3'- phosphorothioate
  modified_base 2: mod_base = OTHER; note = 2'-O-methyluridine-3'-phosphorothioate
  modified_base 3: mod_base = OTHER; note = 2'-O-methylguanosine-3'- phosphorothioate
  modified_base 4: mod_base = OTHER; note = 2'-O-methyladenosine-3'- phosphorothioate
  modified_base 5: mod_base = OTHER; note = 2'-O-methylguanosine-3'- phosphorothioate
  modified_base 6: mod_base = OTHER; note = 2'-deoxythymidine-3'-phosphorothioate
  modified_base 7: mod_base = OTHER; note = 2'-deoxythymidine-3'-phosphorothioate
  modified_base 8: mod_base = OTHER; note = 2'-deoxyguanosine-3'-phosphorothioate
  modified_base 9: mod_base = OTHER; note = 2'-deoxythymidine-3'-phosphorothioate
  modified_base 10: mod_base = OTHER; note = 2'-deoxyguanosine-3'-phosphorothioate
  modified_base 11: mod_base = OTHER; note = 2'-deoxyguanosine-3'-phosphorothioate
  modified_base 12: mod_base = OTHER; note = 5'-methyl-deoxycytidine-3'-phosphorothioate
  modified_base 13: mod_base = OTHER; note = 2'-deoxyguanosine-3'-phosphorothioate
  modified_base 14: mod_base = OTHER; note = 2'-deoxyguanosine-3'-phosphorothioate
  modified_base 15: mod_base = OTHER; note = 5'-methyl-deoxycytidine-3'-phosphorothioate
  modified_base 16: mod_base = OTHER; note = 2'-O-methyladenosine-3'- phosphorothioate
  modified_base 17: mod_base = OTHER; note = 2'-O-methylguanosine-3'- phosphorothioate
  modified_base 18: mod_base = OTHER; note = 2'-O-methyluridine-3'-phosphorothioate
  modified_base 19: mod_base = OTHER; note = 2'-O-methyluridine-3'-phosphorothioate
  modified_base 20: mod_base = OTHER; note = 2'-O-methyluridine-3'-phosphate
  misc_feature 1..5: note = RNA
  misc_feature 6..15: note = DNA
  misc_feature 16..20: note = RNA
ctgagttgtggcggcagttt

SEQ ID NO: 4205 - DNA, 20 bp, synthetic construct
  source 1..20: mol_type = other DNA
  modified_base 1: mod_base = OTHER; note = 2'-O-methyladenosine-3'- phosphorothioate
  modified_base 2: mod_base = OTHER; note = 2'-O-methyladenosine-3'- phosphorothioate
  modified_base 3: mod_base = OTHER; note = 2'-O-methyladenosine-3'- phosphorothioate
  modified_base 4: mod_base = OTHER; note = 2'-O-methyladenosine-3'- phosphorothioate
  modified_base 5: mod_base = OTHER; note = 2'-O-methyluridine-3'-phosphorothioate
  modified_base 6: mod_base = OTHER; note = 2'-deoxythymidine-3'-phosphorothioate
  modified_base 7: mod_base = OTHER; note = 2'-deoxythymidine-3'-phosphorothioate
  modified_base 8: mod_base = OTHER; note = 2'-deoxythymidine-3'-phosphorothioate
  modified_base 9: mod_base = OTHER; note = 2'-deoxythymidine-3'-phosphorothioate
  modified_base 10: mod_base = OTHER; note = 5'-methyl-deoxycytidine-3'-phosphorothioate
  modified_base 11: mod_base = OTHER; note = 2'-deoxyadenosine-3'-phosphorothioate
  modified_base 12: mod_base = OTHER; note = 2'-deoxythymidine-3'-phosphorothioate
  modified_base 13: mod_base = OTHER; note = 5'-methyl-deoxycytidine-3'-phosphorothioate
  modified_base 14: mod_base = OTHER; note = 5'-methyl-deoxycytidine-3'-phosphorothioate
  modified_base 15: mod_base = OTHER; note = 2'-deoxythymidine-3'-phosphorothioate
  modified_base 16: mod_base = OTHER; note = 2'-O-methylguanosine-3'- phosphorothioate
  modified_base 17: mod_base = OTHER; note = 2'-O-methyladenosine-3'- phosphorothioate
  modified_base 18: mod_base = OTHER; note = 2'-O-methylguanosine-3'- phosphorothioate
  modified_base 19: mod_base = OTHER; note = 2'-O-methyluridine-3'-phosphorothioate
  modified_base 20: mod_base = OTHER; note = 2'-O-methyluridine-3'-phosphate
  misc_feature 1..5: note = RNA
  misc_feature 6..15: note = DNA
  misc_feature 16..20: note = RNA
aaaatttttcatcctgagtt

SEQ ID NO: 4206 - DNA, 20 bp, synthetic construct
  source 1..20: mol_type = other DNA
  modified_base 1: mod_base = OTHER; note = 2'-O-methyluridine-3'-phosphorothioate
  modified_base 2: mod_base = OTHER; note = 2'-O-methyladenosine-3'- phosphorothioate
  modified_base 3: mod_base = OTHER; note = 2'-O-methylcytidine-3'- phosphorothioate
  modified_base 4: mod_base = OTHER; note = 2'-O-methyluridine-3'-phosphorothioate
  modified_base 5: mod_base = OTHER; note = 2'-O-methylguanosine-3'- phosphorothioate
  modified_base 6: mod_base = OTHER; note = 2'-deoxyguanosine-3'-phosphorothioate
  modified_base 7: mod_base = OTHER; note = 2'-deoxythymidine-3'-phosphorothioate
  modified_base 8: mod_base = OTHER; note = 2'-deoxythymidine-3'-phosphorothioate
  modified_base 9: mod_base = OTHER; note = 2'-deoxythymidine-3'-phosphorothioate
  modified_base 10: mod_base = OTHER; note = 5'-methyl-deoxycytidine-3'-phosphorothioate
  modified_base 11: mod_base = OTHER; note = 2'-deoxyadenosine-3'-phosphorothioate
  modified_base 12: mod_base = OTHER; note = 2'-deoxyadenosine-3'-phosphorothioate
  modified_base 13: mod_base = OTHER; note = 2'-deoxyadenosine-3'-phosphorothioate
  modified_base 14: mod_base = OTHER; note = 2'-deoxyadenosine-3'-phosphorothioate
  modified_base 15: mod_base = OTHER; note = 2'-deoxythymidine-3'-phosphorothioate
  modified_base 16: mod_base = OTHER; note = 2'-O-methyluridine-3'-phosphorothioate
  modified_base 17: mod_base = OTHER; note = 2'-O-methyluridine-3'-phosphorothioate
  modified_base 18: mod_base = OTHER; note = 2'-O-methyluridine-3'-phosphorothioate
  modified_base 19: mod_base = OTHER; note = 2'-O-methyluridine-3'-phosphorothioate
  modified_base 20: mod_base = OTHER; note = 2'-O-methylcytidine-3'-phosphate
  misc_feature 1..5: note = RNA
  misc_feature 6..15: note = DNA
  misc_feature 16..20: note = RNA
tactggtttcaaaatttttc

SEQ ID NO: 4207 - DNA, 20 bp, synthetic construct
  source 1..20: mol_type = other DNA
  modified_base 1: mod_base = OTHER; note = 2'-O-methyladenosine-3'- phosphorothioate
  modified_base 2: mod_base = OTHER; note = 2'-O-methyladenosine-3'- phosphorothioate
  modified_base 3: mod_base = OTHER; note = 2'-O-methyladenosine-3'- phosphorothioate
  modified_base 4: mod_base = OTHER; note = 2'-O-methyluridine-3'-phosphorothioate
  modified_base 5: mod_base = OTHER; note = 2'-O-methylguanosine-3'- phosphorothioate
  modified_base 6: mod_base = OTHER; note = 2'-deoxyadenosine-3'-phosphorothioate
  modified_base 7: mod_base = OTHER; note = 2'-deoxythymidine-3'-phosphorothioate
  modified_base 8: mod_base = OTHER; note = 2'-deoxyadenosine-3'-phosphorothioate
  modified_base 9: mod_base = OTHER; note = 2'-deoxyadenosine-3'-phosphorothioate
  modified_base 10: mod_base = OTHER; note = 2'-deoxyadenosine-3'-phosphorothioate
  modified_base 11: mod_base = OTHER; note = 2'-deoxyguanosine-3'-phosphorothioate
  modified_base 12: mod_base = OTHER; note = 2'-deoxythymidine-3'-phosphorothioate
  modified_base 13: mod_base = OTHER; note = 2'-deoxyadenosine-3'-phosphorothioate
  modified_base 14: mod_base = OTHER; note = 5'-methyl-deoxycytidine-3'-phosphorothioate
  modified_base 15: mod_base = OTHER; note = 2'-deoxythymidine-3'-phosphorothioate
  modified_base 16: mod_base = OTHER; note = 2'-O-methylguanosine-3'- phosphorothioate
  modified_base 17: mod_base = OTHER; note = 2'-O-methylguanosine-3'- phosphorothioate
  modified_base 18: mod_base = OTHER; note = 2'-O-methyluridine-3'-phosphorothioate
  modified_base 19: mod_base = OTHER; note = 2'-O-methyluridine-3'-phosphorothioate
  modified_base 20: mod_base = OTHER; note = 2'-O-methyluridine-3'-phosphate
  misc_feature 1..5: note = RNA
  misc_feature 6..15: note = DNA
  misc_feature 16..20: note = RNA
aaatgataaagtactggttt

SEQ ID NO: 4208 - DNA, 20 bp, synthetic construct
  source 1..20: mol_type = other DNA
  modified_base 1: mod_base = OTHER; note = 2'-O-methylcytidine-3'- phosphorothioate
  modified_base 2: mod_base = OTHER; note = 2'-O-methylcytidine-3'- phosphorothioate
  modified_base 3: mod_base = OTHER; note = 2'-O-methyluridine-3'-phosphorothioate
  modified_base 4: mod_base = OTHER; note = 2'-O-methylcytidine-3'- phosphorothioate
  modified_base 5: mod_base = OTHER; note = 2'-O-methyladenosine-3'- phosphorothioate
  modified_base 6: mod_base = OTHER; note = 2'-deoxyguanosine-3'-phosphorothioate
  modified_base 7: mod_base = OTHER; note = 2'-deoxyguanosine-3'-phosphorothioate
  modified_base 8: mod_base = OTHER; note = 2'-deoxyadenosine-3'-phosphorothioate
  modified_base 9: mod_base = OTHER; note = 2'-deoxyguanosine-3'-phosphorothioate
  modified_base 10: mod_base = OTHER; note = 2'-deoxyadenosine-3'-phosphorothioate
  modified_base 11: mod_base = OTHER; note = 2'-deoxyadenosine-3'-phosphorothioate
  modified_base 12: mod_base = OTHER; note = 2'-deoxyadenosine-3'-phosphorothioate
  modified_base 13: mod_base = OTHER; note = 2'-deoxyadenosine-3'-phosphorothioate
  modified_base 14: mod_base = OTHER; note = 2'-deoxythymidine-3'-phosphorothioate
  modified_base 15: mod_base = OTHER; note = 2'-deoxyguanosine-3'-phosphorothioate
  modified_base 16: mod_base = OTHER; note = 2'-O-methyladenosine-3'- phosphorothioate
  modified_base 17: mod_base = OTHER; note = 2'-O-methyluridine-3'-phosphorothioate
  modified_base 18: mod_base = OTHER; note = 2'-O-methyladenosine-3'- phosphorothioate
  modified_base 19: mod_base = OTHER; note = 2'-O-methyladenosine-3'- phosphorothioate
  modified_base 20: mod_base = OTHER; note = 2'-O-methyladenosine-3'-phosphate
  misc_feature 1..5: note = RNA
  misc_feature 6..15: note = DNA
  misc_feature 16..20: note = RNA
cctcaggagaaaatgataaa

SEQ ID NO: 4209 - DNA, 20 bp, synthetic construct
  source 1..20: mol_type = other DNA
  modified_base 1: mod_base = OTHER; note = 2'-O-methyluridine-3'-phosphorothioate
  modified_base 2: mod_base = OTHER; note = 2'-O-methylcytidine-3'- phosphorothioate
  modified_base 3: mod_base = OTHER; note = 2'-O-methylcytidine-3'- phosphorothioate
  modified_base 4: mod_base = OTHER; note = 2'-O-methyladenosine-3'- phosphorothioate
  modified_base 5: mod_base = OTHER; note = 2'-O-methyladenosine-3'- phosphorothioate
  modified_base 6: mod_base = OTHER; note = 2'-deoxyadenosine-3'-phosphorothioate
  modified_base 7: mod_base = OTHER; note = 2'-deoxyadenosine-3'-phosphorothioate
  modified_base 8: mod_base = OTHER; note = 2'-deoxythymidine-3'-phosphorothioate
  modified_base 9: mod_base = OTHER; note = 2'-deoxythymidine-3'-phosphorothioate
  modified_base 10: mod_base = OTHER; note = 2'-deoxythymidine-3'-phosphorothioate
  modified_base 11: mod_base = OTHER; note = 2'-deoxythymidine-3'-phosphorothioate
  modified_base 12: mod_base = OTHER; note = 5'-methyl-deoxycytidine-3'-phosphorothioate
  modified_base 13: mod_base = OTHER; note = 5'-methyl-deoxycytidine-3'-phosphorothioate
  modified_base 14: mod_base = OTHER; note = 2'-deoxythymidine-3'-phosphorothioate
  modified_base 15: mod_base = OTHER; note = 5'-methyl-deoxycytidine-3'-phosphorothioate
  modified_base 16: mod_base = OTHER; note = 2'-O-methyladenosine-3'- phosphorothioate
  modified_base 17: mod_base = OTHER; note = 2'-O-methylguanosine-3'- phosphorothioate
  modified_base 18: mod_base = OTHER; note = 2'-O-methylguanosine-3'- phosphorothioate
  modified_base 19: mod_base = OTHER; note = 2'-O-methyladenosine-3'- phosphorothioate
  modified_base 20: mod_base = OTHER; note = 2'-O-methylguanosine-3'-phosphate
  misc_feature 1..5: note = RNA
  misc_feature 6..15: note = DNA
  misc_feature 16..20: note = RNA
tccaaaattttcctcaggag

SEQ ID NO: 4210 - DNA, 20 bp, synthetic construct
  source 1..20: mol_type = other DNA
  modified_base 1: mod_base = OTHER; note = 2'-O-methylguanosine-3'- phosphorothioate
  modified_base 2: mod_base = OTHER; note = 2'-O-methyluridine-3'-phosphorothioate
  modified_base 3: mod_base = OTHER; note = 2'-O-methylcytidine-3'- phosphorothioate
  modified_base 4: mod_base = OTHER; note = 2'-O-methylcytidine-3'- phosphorothioate
  modified_base 5: mod_base = OTHER; note = 2'-O-methyladenosine-3'- phosphorothioate
  modified_base 6: mod_base = OTHER; note = 5'-methyl-deoxycytidine-3'-phosphorothioate
  modified_base 7: mod_base = OTHER; note = 2'-deoxythymidine-3'-phosphorothioate
  modified_base 8: mod_base = OTHER; note = 2'-deoxyguanosine-3'-phosphorothioate
  modified_base 9: mod_base = OTHER; note = 2'-deoxythymidine-3'-phosphorothioate
  modified_base 10: mod_base = OTHER; note = 5'-methyl-deoxycytidine-3'-phosphorothioate
  modified_base 11: mod_base = OTHER; note = 2'-deoxyguanosine-3'-phosphorothioate
  modified_base 12: mod_base = OTHER; note = 2'-deoxythymidine-3'-phosphorothioate
  modified_base 13: mod_base = OTHER; note = 5'-methyl-deoxycytidine-3'-phosphorothioate
  modified_base 14: mod_base = OTHER; note = 2'-deoxythymidine-3'-phosphorothioate
  modified_base 15: mod_base = OTHER; note = 5'-methyl-deoxycytidine-3'-phosphorothioate
  modified_base 16: mod_base = OTHER; note = 2'-O-methylcytidine-3'- phosphorothioate
  modified_base 17: mod_base = OTHER; note = 2'-O-methyladenosine-3'- phosphorothioate
  modified_base 18: mod_base = OTHER; note = 2'-O-methyladenosine-3'- phosphorothioate
  modified_base 19: mod_base = OTHER; note = 2'-O-methyladenosine-3'- phosphorothioate
  modified_base 20: mod_base = OTHER; note = 2'-O-methyladenosine-3'-phosphate
  misc_feature 1..5: note = RNA
  misc_feature 6..15: note = DNA
  misc_feature 16..20: note = RNA
gtccactgtcgtctccaaaa

SEQ ID NO: 4211 - DNA, 20 bp, synthetic construct
  source 1..20: mol_type = other DNA
  modified_base 1: mod_base = OTHER; note = 2'-O-methyladenosine-3'- phosphorothioate
  modified_base 2: mod_base = OTHER; note = 2'-O-methyluridine-3'-phosphorothioate
  modified_base 3: mod_base = OTHER; note = 2'-O-methyladenosine-3'- phosphorothioate
  modified_base 4: mod_base = OTHER; note = 2'-O-methyluridine-3'-phosphorothioate
  modified_base 5: mod_base = OTHER; note = 2'-O-methylguanosine-3'- phosphorothioate
  modified_base 6: mod_base = OTHER; note = 5'-methyl-deoxycytidine-3'-phosphorothioate
  modified_base 7: mod_base = OTHER; note = 2'-deoxyadenosine-3'-phosphorothioate
  modified_base 8: mod_base = OTHER; note = 2'-deoxyguanosine-3'-phosphorothioate
  modified_base 9: mod_base = OTHER; note = 5'-methyl-deoxycytidine-3'-phosphorothioate
  modified_base 10: mod_base = OTHER; note = 2'-deoxyadenosine-3'-phosphorothioate
  modified_base 11: mod_base = OTHER; note = 2'-deoxyadenosine-3'-phosphorothioate
  modified_base 12: mod_base = OTHER; note = 2'-deoxyguanosine-3'-phosphorothioate
  modified_base 13: mod_base = OTHER; note = 2'-deoxythymidine-3'-phosphorothioate
  modified_base 14: mod_base = OTHER; note = 5'-methyl-deoxycytidine-3'-phosphorothioate
  modified_base 15: mod_base = OTHER; note = 5'-methyl-deoxycytidine-3'-phosphorothioate
  modified_base 16: mod_base = OTHER; note = 2'-O-methyladenosine-3'- phosphorothioate
  modified_base 17: mod_base = OTHER; note = 2'-O-methylcytidine-3'- phosphorothioate
  modified_base 18: mod_base = OTHER; note = 2'-O-methyluridine-3'-phosphorothioate
  modified_base 19: mod_base = OTHER; note = 2'-O-methylguanosine-3'- phosphorothioate
  modified_base 20: mod_base = OTHER; note = 2'-O-methyluridine-3'-phosphate
  misc_feature 1..5: note = RNA
  misc_feature 6..15: note = DNA
  misc_feature 16..20: note = RNA
atatgcagcaagtccactgt

SEQ ID NO: 4212 - DNA, 20 bp, synthetic construct
  source 1..20: mol_type = other DNA
  modified_base 1: mod_base = OTHER; note = 2'-O-methyluridine-3'-phosphorothioate
  modified_base 2: mod_base = OTHER; note = 2'-O-methyluridine-3'-phosphorothioate
  modified_base 3: mod_base = OTHER; note = 2'-O-methyluridine-3'-phosphorothioate
  modified_base 4: mod_base = OTHER; note = 2'-O-methyladenosine-3'- phosphorothioate
  modified_base 5: mod_base = OTHER; note = 2'-O-methylguanosine-3'- phosphorothioate
  modified_base 6: mod_base = OTHER; note = 5'-methyl-deoxycytidine-3'-phosphorothioate
  modified_base 7: mod_base = OTHER; note = 5'-methyl-deoxycytidine-3'-phosphorothioate
  modified_base 8: mod_base = OTHER; note = 2'-deoxyadenosine-3'-phosphorothioate
  modified_base 9: mod_base = OTHER; note = 5'-methyl-deoxycytidine-3'-phosphorothioate
  modified_base 10: mod_base = OTHER; note = 2'-deoxyadenosine-3'-phosphorothioate
  modified_base 11: mod_base = OTHER; note = 2'-deoxythymidine-3'-phosphorothioate
  modified_base 12: mod_base = OTHER; note = 2'-deoxyadenosine-3'-phosphorothioate
  modified_base 13: mod_base = OTHER; note = 2'-deoxythymidine-3'-phosphorothioate
  modified_base 14: mod_base = OTHER; note = 2'-deoxyguanosine-3'-phosphorothioate
  modified_base 15: mod_base = OTHER; note = 5'-methyl-deoxycytidine-3'-phosphorothioate
  modified_base 16: mod_base = OTHER; note = 2'-O-methyladenosine-3'- phosphorothioate
  modified_base 17: mod_base = OTHER; note = 2'-O-methylguanosine-3'- phosphorothioate
  modified_base 18: mod_base = OTHER; note = 2'-O-methylcytidine-3'- phosphorothioate
  modified_base 19: mod_base = OTHER; note = 2'-O-methyladenosine-3'- phosphorothioate
  modified_base 20: mod_base = OTHER; note = 2'-O-methyladenosine-3'-phosphate
  misc_feature 1..5: note = RNA
  misc_feature 6..15: note = DNA
  misc_feature 16..20: note = RNA
tttagccacatatgcagcaa

SEQ ID NO: 4213 - DNA, 20 bp, synthetic construct
  source 1..20: mol_type = other DNA
  modified_base 1: mod_base = OTHER; note = 2'-O-methyluridine-3'-phosphorothioate
  modified_base 2: mod_base = OTHER; note = 2'-O-methylguanosine-3'- phosphorothioate
  modified_base 3: mod_base = OTHER; note = 2'-O-methylguanosine-3'- phosphorothioate
  modified_base 4: mod_base = OTHER; note = 2'-O-methylguanosine-3'- phosphorothioate
  modified_base 5: mod_base = OTHER; note = 2'-O-methyluridine-3'-phosphorothioate
  modified_base 6: mod_base = OTHER; note = 5'-methyl-deoxycytidine-3'-phosphorothioate
  modified_base 7: mod_base = OTHER; note = 2'-deoxythymidine-3'-phosphorothioate
  modified_base 8: mod_base = OTHER; note = 2'-deoxyadenosine-3'-phosphorothioate
  modified_base 9: mod_base = OTHER; note = 2'-deoxythymidine-3'-phosphorothioate
  modified_base 10: mod_base = OTHER; note = 2'-deoxythymidine-3'-phosphorothioate
  modified_base 11: mod_base = OTHER; note = 2'-deoxyguanosine-3'-phosphorothioate
  modified_base 12: mod_base = OTHER; note = 5'-methyl-deoxycytidine-3'-phosphorothioate
  modified_base 13: mod_base = OTHER; note = 2'-deoxythymidine-3'-phosphorothioate
  modified_base 14: mod_base = OTHER; note = 2'-deoxythymidine-3'-phosphorothioate
  modified_base 15: mod_base = OTHER; note = 2'-deoxythymidine-3'-phosphorothioate
  modified_base 16: mod_base = OTHER; note = 2'-O-methyladenosine-3'- phosphorothioate
  modified_base 17: mod_base = OTHER; note = 2'-O-methylguanosine-3'- phosphorothioate
  modified_base 18: mod_base = OTHER; note = 2'-O-methylcytidine-3'- phosphorothioate
  modified_base 19: mod_base = OTHER; note = 2'-O-methylcytidine-3'- phosphorothioate
  modified_base 20: mod_base = OTHER; note = 2'-O-methyladenosine-3'-phosphate
  misc_feature 1..5: note = RNA
  misc_feature 6..15: note = DNA
  misc_feature 16..20: note = RNA
tgggtctattgctttagcca

SEQ ID NO: 4214 - DNA, 20 bp, synthetic construct
  source 1..20: mol_type = other DNA
  modified_base 1: mod_base = OTHER; note = 2'-O-methyladenosine-3'- phosphorothioate
  modified_base 2: mod_base = OTHER; note = 2'-O-methylguanosine-3'- phosphorothioate
  modified_base 3: mod_base = OTHER; note = 2'-O-methylcytidine-3'- phosphorothioate
  modified_base 4: mod_base = OTHER; note = 2'-O-methyluridine-3'-phosphorothioate
  modified_base 5: mod_base = OTHER; note = 2'-O-methylguanosine-3'- phosphorothioate
  modified_base 6: mod_base = OTHER; note = 2'-deoxyadenosine-3'-phosphorothioate
  modified_base 7: mod_base = OTHER; note = 2'-deoxythymidine-3'-phosphorothioate
  modified_base 8: mod_base = OTHER; note = 2'-deoxyadenosine-3'-phosphorothioate
  modified_base 9: mod_base = OTHER; note = 2'-deoxyguanosine-3'-phosphorothioate
  modified_base 10: mod_base = OTHER; note = 2'-deoxyadenosine-3'-phosphorothioate
  modified_base 11: mod_base = OTHER; note = 2'-deoxythymidine-3'-phosphorothioate
  modified_base 12: mod_base = OTHER; note = 2'-deoxyguanosine-3'-phosphorothioate
  modified_base 13: mod_base = OTHER; note = 2'-deoxyguanosine-3'-phosphorothioate
  modified_base 14: mod_base = OTHER; note = 2'-deoxyguanosine-3'-phosphorothioate
  modified_base 15: mod_base = OTHER; note = 2'-deoxythymidine-3'-phosphorothioate
  modified_base 16: mod_base = OTHER; note = 2'-O-methylcytidine-3'- phosphorothioate
  modified_base 17: mod_base = OTHER; note = 2'-O-methyluridine-3'-phosphorothioate
  modified_base 18: mod_base = OTHER; note = 2'-O-methyladenosine-3'- phosphorothioate
  modified_base 19: mod_base = OTHER; note = 2'-O-methyluridine-3'-phosphorothioate
  modified_base 20: mod_base = OTHER; note = 2'-O-methyluridine-3'-phosphate
  misc_feature 1..5: note = RNA
  misc_feature 6..15: note = DNA
  misc_feature 16..20: note = RNA
agctgatagatgggtctatt

SEQ ID NO: 4215 - DNA, 20 bp, synthetic construct
  source 1..20: mol_type = other DNA
  modified_base 1: mod_base = OTHER; note = 2'-O-methylguanosine-3'- phosphorothioate
  modified_base 2: mod_base = OTHER; note = 2'-O-methyladenosine-3'- phosphorothioate
  modified_base 3: mod_base = OTHER; note = 2'-O-methyluridine-3'-phosphorothioate
  modified_base 4: mod_base = OTHER; note = 2'-O-methyladenosine-3'- phosphorothioate
  modified_base 5: mod_base = OTHER; note = 2'-O-methyluridine-3'-phosphorothioate
  modified_base 6: mod_base = OTHER; note = 5'-methyl-deoxycytidine-3'-phosphorothioate
  modified_base 7: mod_base = OTHER; note = 2'-deoxythymidine-3'-phosphorothioate
  modified_base 8: mod_base = OTHER; note = 2'-deoxythymidine-3'-phosphorothioate
  modified_base 9: mod_base = OTHER; note = 5'-methyl-deoxycytidine-3'-phosphorothioate
  modified_base 10: mod_base = OTHER; note = 5'-methyl-deoxycytidine-3'-phosphorothioate
  modified_base 11: mod_base = OTHER; note = 5'-methyl-deoxycytidine-3'-phosphorothioate
  modified_base 12: mod_base = OTHER; note = 2'-deoxyadenosine-3'-phosphorothioate
  modified_base 13: mod_base = OTHER; note = 2'-deoxyguanosine-3'-phosphorothioate
  modified_base 14: mod_base = OTHER; note = 5'-methyl-deoxycytidine-3'-phosphorothioate
  modified_base 15: mod_base = OTHER; note = 2'-deoxythymidine-3'-phosphorothioate
  modified_base 16: mod_base = OTHER; note = 2'-O-methylguanosine-3'- phosphorothioate
  modified_base 17: mod_base = OTHER; note = 2'-O-methyladenosine-3'- phosphorothioate
  modified_base 18: mod_base = OTHER; note = 2'-O-methyluridine-3'-phosphorothioate
  modified_base 19: mod_base = OTHER; note = 2'-O-methyladenosine-3'- phosphorothioate
  modified_base 20: mod_base = OTHER; note = 2'-O-methylguanosine-3'-phosphate
  misc_feature 1..5: note = RNA
  misc_feature 6..15: note = DNA
  misc_feature 16..20: note = RNA
gatatcttcccagctgatag

SEQ ID NO: 4216 - DNA, 20 bp, synthetic construct
  source 1..20: mol_type = other DNA
  modified_base 1: mod_base = OTHER; note = 2'-O-methylcytidine-3'- phosphorothioate
  modified_base 2: mod_base = OTHER; note = 2'-O-methyluridine-3'-phosphorothioate
  modified_base 3: mod_base = OTHER; note = 2'-O-methylcytidine-3'- phosphorothioate
  modified_base 4: mod_base = OTHER; note = 2'-O-methyladenosine-3'- phosphorothioate
  modified_base 5: mod_base = OTHER; note = 2'-O-methylguanosine-3'- phosphorothioate
  modified_base 6: mod_base = OTHER; note = 5'-methyl-deoxycytidine-3'-phosphorothioate
  modified_base 7: mod_base = OTHER; note = 5'-methyl-deoxycytidine-3'-phosphorothioate
  modified_base 8: mod_base = OTHER; note = 2'-deoxyadenosine-3'-phosphorothioate
  modified_base 9: mod_base = OTHER; note = 2'-deoxythymidine-3'-phosphorothioate
  modified_base 10: mod_base = OTHER; note = 2'-deoxythymidine-3'-phosphorothioate
  modified_base 11: mod_base = OTHER; note = 2'-deoxythymidine-3'-phosphorothioate
  modified_base 12: mod_base = OTHER; note = 2'-deoxyguanosine-3'-phosphorothioate
  modified_base 13: mod_base = OTHER; note = 2'-deoxyadenosine-3'-phosphorothioate
  modified_base 14: mod_base = OTHER; note = 2'-deoxythymidine-3'-phosphorothioate
  modified_base 15: mod_base = OTHER; note = 2'-deoxyadenosine-3'-phosphorothioate
  modified_base 16: mod_base = OTHER; note = 2'-O-methyluridine-3'-phosphorothioate
  modified_base 17: mod_base = OTHER; note = 2'-O-methylcytidine-3'- phosphorothioate
  modified_base 18: mod_base = OTHER; note = 2'-O-methyluridine-3'-phosphorothioate
  modified_base 19: mod_base = OTHER; note = 2'-O-methyluridine-3'-phosphorothioate
  modified_base 20: mod_base = OTHER; note = 2'-O-methylcytidine-3'-phosphate
  misc_feature 1..5: note = RNA
  misc_feature 6..15: note = DNA
  misc_feature 16..20: note = RNA
ctcagccatttgatatcttc

SEQ ID NO: 4217 - DNA, 20 bp, synthetic construct
  source 1..20: mol_type = other DNA
  modified_base 1: mod_base = OTHER; note = 2'-O-methylguanosine-3'- phosphorothioate
  modified_base 2: mod_base = OTHER; note = 2'-O-methyladenosine-3'- phosphorothioate
  modified_base 3: mod_base = OTHER; note = 2'-O-methyluridine-3'-phosphorothioate
  modified_base 4: mod_base = OTHER; note = 2'-O-methylguanosine-3'- phosphorothioate
  modified_base 5: mod_base = OTHER; note = 2'-O-methyluridine-3'-phosphorothioate
  modified_base 6: mod_base = OTHER; note = 5'-methyl-deoxycytidine-3'-phosphorothioate
  modified_base 7: mod_base = OTHER; note = 2'-deoxyadenosine-3'-phosphorothioate
  modified_base 8: mod_base = OTHER; note = 2'-deoxyguanosine-3'-phosphorothioate
  modified_base 9: mod_base = OTHER; note = 2'-deoxythymidine-3'-phosphorothioate
  modified_base 10: mod_base = OTHER; note = 5'-methyl-deoxycytidine-3'-phosphorothioate
  modified_base 11: mod_base = OTHER; note = 2'-deoxythymidine-3'-phosphorothioate
  modified_base 12: mod_base = OTHER; note = 2'-deoxythymidine-3'-phosphorothioate
  modified_base 13: mod_base = OTHER; note = 5'-methyl-deoxycytidine-3'-phosphorothioate
  modified_base 14: mod_base = OTHER; note = 2'-deoxythymidine-3'-phosphorothioate
  modified_base 15: mod_base = OTHER; note = 5'-methyl-deoxycytidine-3'-phosphorothioate
  modified_base 16: mod_base = OTHER; note = 2'-O-methyladenosine-3'- phosphorothioate
  modified_base 17: mod_base = OTHER; note = 2'-O-methylguanosine-3'- phosphorothioate
  modified_base 18: mod_base = OTHER; note = 2'-O-methylcytidine-3'- phosphorothioate
  modified_base 19: mod_base = OTHER; note = 2'-O-methylcytidine-3'- phosphorothioate
  modified_base 20: mod_base = OTHER; note = 2'-O-methyladenosine-3'-phosphate
  misc_feature 1..5: note = RNA
  misc_feature 6..15: note = DNA
  misc_feature 16..20: note = RNA
gatgtcagtcttctcagcca

SEQ ID NO: 4218 - DNA, 20 bp, synthetic construct
  source 1..20: mol_type = other DNA
  modified_base 1: mod_base = OTHER; note = 2'-O-methylcytidine-3'- phosphorothioate
  modified_base 2: mod_base = OTHER; note = 2'-O-methyladenosine-3'- phosphorothioate
  modified_base 3: mod_base = OTHER; note = 2'-O-methyladenosine-3'- phosphorothioate
  modified_base 4: mod_base = OTHER; note = 2'-O-methyluridine-3'-phosphorothioate
  modified_base 5: mod_base = OTHER; note = 2'-O-methyluridine-3'-phosphorothioate
  modified_base 6: mod_base = OTHER; note = 2'-deoxyguanosine-3'-phosphorothioate
  modified_base 7: mod_base = OTHER; note = 2'-deoxyguanosine-3'-phosphorothioate
  modified_base 8: mod_base = OTHER; note = 5'-methyl-deoxycytidine-3'-phosphorothioate
  modified_base 9: mod_base = OTHER; note = 2'-deoxyadenosine-3'-phosphorothioate
  modified_base 10: mod_base = OTHER; note = 2'-deoxyadenosine-3'-phosphorothioate
  modified_base 11: mod_base = OTHER; note = 2'-deoxythymidine-3'-phosphorothioate
  modified_base 12: mod_base = OTHER; note = 2'-deoxyguanosine-3'-phosphorothioate
  modified_base 13: mod_base = OTHER; note = 2'-deoxyadenosine-3'-phosphorothioate
  modified_base 14: mod_base = OTHER; note = 2'-deoxythymidine-3'-phosphorothioate
  modified_base 15: mod_base = OTHER; note = 2'-deoxyguanosine-3'-phosphorothioate
  modified_base 16: mod_base = OTHER; note = 2'-O-methyluridine-3'-phosphorothioate
  modified_base 17: mod_base = OTHER; note = 2'-O-methylcytidine-3'- phosphorothioate
  modified_base 18: mod_base = OTHER; note = 2'-O-methyladenosine-3'- phosphorothioate
  modified_base 19: mod_base = OTHER; note = 2'-O-methylguanosine-3'- phosphorothioate
  modified_base 20: mod_base = OTHER; note = 2'-O-methyluridine-3'-phosphate
  misc_feature 1..5: note = RNA
  misc_feature 6..15: note = DNA
  misc_feature 16..20: note = RNA
caattggcaatgatgtcagt

SEQ ID NO: 4219 - DNA, 20 bp, synthetic construct
  source 1..20: mol_type = other DNA
  modified_base 1: mod_base = OTHER; note = 2'-O-methylcytidine-3'- phosphorothioate
  modified_base 2: mod_base = OTHER; note = 2'-O-methylcytidine-3'- phosphorothioate
  modified_base 3: mod_base = OTHER; note = 2'-O-methylcytidine-3'- phosphorothioate
  modified_base 4: mod_base = OTHER; note = 2'-O-methyluridine-3'-phosphorothioate
  modified_base 5: mod_base = OTHER; note = 2'-O-methyluridine-3'-phosphorothioate
  modified_base 6: mod_base = OTHER; note = 2'-deoxythymidine-3'-phosphorothioate
  modified_base 7: mod_base = OTHER; note = 2'-deoxyguanosine-3'-phosphorothioate
  modified_base 8: mod_base = OTHER; note = 5'-methyl-deoxycytidine-3'-phosphorothioate
  modified_base 9: mod_base = OTHER; note = 2'-deoxyadenosine-3'-phosphorothioate
  modified_base 10: mod_base = OTHER; note = 2'-deoxyadenosine-3'-phosphorothioate
  modified_base 11: mod_base = OTHER; note = 5'-methyl-deoxycytidine-3'-phosphorothioate
  modified_base 12: mod_base = OTHER; note = 2'-deoxyadenosine-3'-phosphorothioate
  modified_base 13: mod_base = OTHER; note = 2'-deoxyadenosine-3'-phosphorothioate
  modified_base 14: mod_base = OTHER; note = 2'-deoxythymidine-3'-phosphorothioate
  modified_base 15: mod_base = OTHER; note = 2'-deoxythymidine-3'-phosphorothioate
  modified_base 16: mod_base = OTHER; note = 2'-O-methylguanosine-3'- phosphorothioate
  modified_base 17: mod_base = OTHER; note = 2'-O-methylguanosine-3'- phosphorothioate
  modified_base 18: mod_base = OTHER; note = 2'-O-methylcytidine-3'- phosphorothioate
  modified_base 19: mod_base = OTHER; note = 2'-O-methyladenosine-3'- phosphorothioate
  modified_base 20: mod_base = OTHER; note = 2'-O-methyladenosine-3'-phosphate
  misc_feature 1..5: note = RNA
  misc_feature 6..15: note = DNA
  misc_feature 16..20: note = RNA
ccctttgcaacaattggcaa

SEQ ID NO: 4220 - DNA, 20 bp, synthetic construct
  source 1..20: mol_type = other DNA
  modified_base 1: mod_base = OTHER; note = 2'-O-methylcytidine-3'- phosphorothioate
  modified_base 2: mod_base = OTHER; note = 2'-O-methyluridine-3'-phosphorothioate
  modified_base 3: mod_base = OTHER; note = 2'-O-methylcytidine-3'- phosphorothioate
  modified_base 4: mod_base = OTHER; note = 2'-O-methyluridine-3'-phosphorothioate
  modified_base 5: mod_base = OTHER; note = 2'-O-methylcytidine-3'- phosphorothioate
  modified_base 6: mod_base = OTHER; note = 2'-deoxyadenosine-3'-phosphorothioate
  modified_base 7: mod_base = OTHER; note = 2'-deoxyadenosine-3'-phosphorothioate
  modified_base 8: mod_base = OTHER; note = 2'-deoxyadenosine-3'-phosphorothioate
  modified_base 9: mod_base = OTHER; note = 2'-deoxyadenosine-3'-phosphorothioate
  modified_base 10: mod_base = OTHER; note = 2'-deoxythymidine-3'-phosphorothioate
  modified_base 11: mod_base = OTHER; note = 2'-deoxyguanosine-3'-phosphorothioate
  modified_base 12: mod_base = OTHER; note = 5'-methyl-deoxycytidine-3'-phosphorothioate
  modified_base 13: mod_base = OTHER; note = 5'-methyl-deoxycytidine-3'-phosphorothioate
  modified_base 14: mod_base = OTHER; note = 5'-methyl-deoxycytidine-3'-phosphorothioate
  modified_base 15: mod_base = OTHER; note = 2'-deoxythymidine-3'-phosphorothioate
  modified_base 16: mod_base = OTHER; note = 2'-O-methyluridine-3'-phosphorothioate
  modified_base 17: mod_base = OTHER; note = 2'-O-methyluridine-3'-phosphorothioate
  modified_base 18: mod_base = OTHER; note = 2'-O-methylguanosine-3'- phosphorothioate
  modified_base 19: mod_base = OTHER; note = 2'-O-methylcytidine-3'- phosphorothioate
  modified_base 20: mod_base = OTHER; note = 2'-O-methyladenosine-3'-phosphate
  misc_feature 1..5: note = RNA
  misc_feature 6..15: note = DNA
  misc_feature 16..20: note = RNA
ctctcaaaatgccctttgca

SEQ ID NO: 4221 - DNA, 20 bp, synthetic construct
  source 1..20: mol_type = other DNA
  modified_base 1: mod_base = OTHER; note = 2'-O-methylguanosine-3'- phosphorothioate
  modified_base 2: mod_base = OTHER; note = 2'-O-methylguanosine-3'- phosphorothioate
  modified_base 3: mod_base = OTHER; note = 2'-O-methylcytidine-3'- phosphorothioate
  modified_base 4: mod_base = OTHER; note = 2'-O-methyladenosine-3'- phosphorothioate
  modified_base 5: mod_base = OTHER; note = 2'-O-methyluridine-3'-phosphorothioate
  modified_base 6: mod_base = OTHER; note = 5'-methyl-deoxycytidine-3'-phosphorothioate
  modified_base 7: mod_base = OTHER; note = 2'-deoxyadenosine-3'-phosphorothioate
  modified_base 8: mod_base = OTHER; note = 2'-deoxythymidine-3'-phosphorothioate
  modified_base 9: mod_base = OTHER; note = 5'-methyl-deoxycytidine-3'-phosphorothioate
  modified_base 10: mod_base = OTHER; note = 2'-deoxyadenosine-3'-phosphorothioate
  modified_base 11: mod_base = OTHER; note = 5'-methyl-deoxycytidine-3'-phosphorothioate
  modified_base 12: mod_base = OTHER; note = 5'-methyl-deoxycytidine-3'-phosphorothioate
  modified_base 13: mod_base = OTHER; note = 2'-deoxythymidine-3'-phosphorothioate
  modified_base 14: mod_base = OTHER; note = 5'-methyl-deoxycytidine-3'-phosphorothioate
  modified_base 15: mod_base = OTHER; note = 2'-deoxythymidine-3'-phosphorothioate
  modified_base 16: mod_base = OTHER; note = 2'-O-methylcytidine-3'- phosphorothioate
  modified_base 17: mod_base = OTHER; note = 2'-O-methyladenosine-3'- phosphorothioate
  modified_base 18: mod_base = OTHER; note = 2'-O-methyladenosine-3'- phosphorothioate
  modified_base 19: mod_base = OTHER; note = 2'-O-methyladenosine-3'- phosphorothioate
  modified_base 20: mod_base = OTHER; note = 2'-O-methyladenosine-3'-phosphate
  misc_feature 1..5: note = RNA
  misc_feature 6..15: note = DNA
  misc_feature 16..20: note = RNA
ggcatcatcacctctcaaaa

SEQ ID NO: 4222 - DNA, 20 bp, synthetic construct
  source 1..20: mol_type = other DNA
  modified_base 1: mod_base = OTHER; note = 2'-O-methyladenosine-3'- phosphorothioate
  modified_base 2: mod_base = OTHER; note = 2'-O-methyladenosine-3'- phosphorothioate
  modified_base 3: mod_base = OTHER; note = 2'-O-methylcytidine-3'- phosphorothioate
  modified_base 4: mod_base = OTHER; note = 2'-O-methyladenosine-3'- phosphorothioate
  modified_base 5: mod_base = OTHER; note = 2'-O-methylguanosine-3'- phosphorothioate
  modified_base 6: mod_base = OTHER; note = 5'-methyl-deoxycytidine-3'-phosphorothioate
  modified_base 7: mod_base = OTHER; note = 5'-methyl-deoxycytidine-3'-phosphorothioate
  modified_base 8: mod_base = OTHER; note = 2'-deoxythymidine-3'-phosphorothioate
  modified_base 9: mod_base = OTHER; note = 5'-methyl-deoxycytidine-3'-phosphorothioate
  modified_base 10: mod_base = OTHER; note = 5'-methyl-deoxycytidine-3'-phosphorothioate
  modified_base 11: mod_base = OTHER; note = 5'-methyl-deoxycytidine-3'-phosphorothioate
  modified_base 12: mod_base = OTHER; note = 2'-deoxythymidine-3'-phosphorothioate
  modified_base 13: mod_base = OTHER; note = 2'-deoxyguanosine-3'-phosphorothioate
  modified_base 14: mod_base = OTHER; note = 2'-deoxyguanosine-3'-phosphorothioate
  modified_base 15: mod_base = OTHER; note = 5'-methyl-deoxycytidine-3'-phosphorothioate
  modified_base 16: mod_base = OTHER; note = 2'-O-methyladenosine-3'- phosphorothioate
  modified_base 17: mod_base = OTHER; note = 2'-O-methyluridine-3'-phosphorothioate
  modified_base 18: mod_base = OTHER; note = 2'-O-methylcytidine-3'- phosphorothioate
  modified_base 19: mod_base = OTHER; note = 2'-O-methyladenosine-3'- phosphorothioate
  modified_base 20: mod_base = OTHER; note = 2'-O-methyluridine-3'-phosphate
  misc_feature 1..5: note = RNA
  misc_feature 6..15: note = DNA
  misc_feature 16..20: note = RNA
aacagcctccctggcatcat

SEQ ID NO: 4223 - DNA, 20 bp, synthetic construct
  source 1..20: mol_type = other DNA
  modified_base 1: mod_base = OTHER; note = 2'-O-methyladenosine-3'- phosphorothioate
  modified_base 2: mod_base = OTHER; note = 2'-O-methyladenosine-3'- phosphorothioate
  modified_base 3: mod_base = OTHER; note = 2'-O-methylguanosine-3'- phosphorothioate
  modified_base 4: mod_base = OTHER; note = 2'-O-methylcytidine-3'- phosphorothioate
  modified_base 5: mod_base = OTHER; note = 2'-O-methylcytidine-3'- phosphorothioate
  modified_base 6: mod_base = OTHER; note = 2'-deoxyadenosine-3'-phosphorothioate
  modified_base 7: mod_base = OTHER; note = 2'-deoxythymidine-3'-phosphorothioate
  modified_base 8: mod_base = OTHER; note = 2'-deoxyguanosine-3'-phosphorothioate
  modified_base 9: mod_base = OTHER; note = 2'-deoxythymidine-3'-phosphorothioate
  modified_base 10: mod_base = OTHER; note = 2'-deoxythymidine-3'-phosphorothioate
  modified_base 11: mod_base = OTHER; note = 2'-deoxythymidine-3'-phosphorothioate
  modified_base 12: mod_base = OTHER; note = 2'-deoxyadenosine-3'-phosphorothioate
  modified_base 13: mod_base = OTHER; note = 2'-deoxyadenosine-3'-phosphorothioate
  modified_base 14: mod_base = OTHER; note = 5'-methyl-deoxycytidine-3'-phosphorothioate
  modified_base 15: mod_base = OTHER; note = 2'-deoxyadenosine-3'-phosphorothioate
  modified_base 16: mod_base = OTHER; note = 2'-O-methylguanosine-3'- phosphorothioate
  modified_base 17: mod_base = OTHER; note = 2'-O-methylcytidine-3'- phosphorothioate
  modified_base 18: mod_base = OTHER; note = 2'-O-methylcytidine-3'- phosphorothioate
  modified_base 19: mod_base = OTHER; note = 2'-O-methyluridine-3'-phosphorothioate
  modified_base 20: mod_base = OTHER; note = 2'-O-methylcytidine-3'-phosphate
  misc_feature 1..5: note = RNA
  misc_feature 6..15: note = DNA
  misc_feature 16..20: note = RNA
aagccatgtttaacagcctc

SEQ ID NO: 4224 - DNA, 20 bp, synthetic construct
  source 1..20: mol_type = other DNA
  modified_base 1: mod_base = OTHER; note = 2'-O-methyladenosine-3'- phosphorothioate
  modified_base 2: mod_base = OTHER; note = 2'-O-methyladenosine-3'- phosphorothioate
  modified_base 3: mod_base = OTHER; note = 2'-O-methylguanosine-3'- phosphorothioate
  modified_base 4: mod_base = OTHER; note = 2'-O-methyladenosine-3'- phosphorothioate
  modified_base 5: mod_base = OTHER; note = 2'-O-methyluridine-3'-phosphorothioate
  modified_base 6: mod_base = OTHER; note = 5'-methyl-deoxycytidine-3'-phosphorothioate
  modified_base 7: mod_base = OTHER; note = 5'-methyl-deoxycytidine-3'-phosphorothioate
  modified_base 8: mod_base = OTHER; note = 5'-methyl-deoxycytidine-3'-phosphorothioate
  modified_base 9: mod_base = OTHER; note = 2'-deoxyadenosine-3'-phosphorothioate
  modified_base 10: mod_base = OTHER; note = 2'-deoxythymidine-3'-phosphorothioate
  modified_base 11: mod_base = OTHER; note = 2'-deoxythymidine-3'-phosphorothioate
  modified_base 12: mod_base = OTHER; note = 5'-methyl-deoxycytidine-3'-phosphorothioate
  modified_base 13: mod_base = OTHER; note = 2'-deoxyadenosine-3'-phosphorothioate
  modified_base 14: mod_base = OTHER; note = 2'-deoxyadenosine-3'-phosphorothioate
  modified_base 15: mod_base = OTHER; note = 2'-deoxyguanosine-3'-phosphorothioate
  modified_base 16: mod_base = OTHER; note = 2'-O-methylcytidine-3'- phosphorothioate
  modified_base 17: mod_base = OTHER; note = 2'-O-methylcytidine-3'- phosphorothioate
  modified_base 18: mod_base = OTHER; note = 2'-O-methyladenosine-3'- phosphorothioate
  modified_base 19: mod_base = OTHER; note = 2'-O-methyluridine-3'-phosphorothioate
  modified_base 20: mod_base = OTHER; note = 2'-O-methylguanosine-3'-phosphate
  misc_feature 1..5: note = RNA
  misc_feature 6..15: note = DNA
  misc_feature 16..20: note = RNA
aagatcccattcaagccatg

SEQ ID NO: 4225 - DNA, 20 bp, synthetic construct
  source 1..20: mol_type = other DNA
  modified_base 1: mod_base = OTHER; note = 2'-O-methyluridine-3'-phosphorothioate
  modified_base 2: mod_base = OTHER; note = 2'-O-methyluridine-3'-phosphorothioate
  modified_base 3: mod_base = OTHER; note = 2'-O-methylcytidine-3'- phosphorothioate
  modified_base 4: mod_base = OTHER; note = 2'-O-methylguanosine-3'- phosphorothioate
  modified_base 5: mod_base = OTHER; note = 2'-O-methyladenosine-3'- phosphorothioate
  modified_base 6: mod_base = OTHER; note = 5'-methyl-deoxycytidine-3'-phosphorothioate
  modified_base 7: mod_base = OTHER; note = 2'-deoxyadenosine-3'-phosphorothioate
  modified_base 8: mod_base = OTHER; note = 5'-methyl-deoxycytidine-3'-phosphorothioate
  modified_base 9: mod_base = OTHER; note = 5'-methyl-deoxycytidine-3'-phosphorothioate
  modified_base 10: mod_base = OTHER; note = 2'-deoxyadenosine-3'-phosphorothioate
  modified_base 11: mod_base = OTHER; note = 2'-deoxyadenosine-3'-phosphorothioate
  modified_base 12: mod_base = OTHER; note = 2'-deoxyguanosine-3'-phosphorothioate
  modified_base 13: mod_base = OTHER; note = 2'-deoxyadenosine-3'-phosphorothioate
  modified_base 14: mod_base = OTHER; note = 2'-deoxythymidine-3'-phosphorothioate
  modified_base 15: mod_base = OTHER; note = 5'-methyl-deoxycytidine-3'-phosphorothioate
  modified_base 16: mod_base = OTHER; note = 2'-O-methylcytidine-3'- phosphorothioate
  modified_base 17: mod_base = OTHER; note = 2'-O-methylcytidine-3'- phosphorothioate
  modified_base 18: mod_base = OTHER; note = 2'-O-methyladenosine-3'- phosphorothioate
  modified_base 19: mod_base = OTHER; note = 2'-O-methyluridine-3'-phosphorothioate
  modified_base 20: mod_base = OTHER; note = 2'-O-methyluridine-3'-phosphate
  misc_feature 1..5: note = RNA
  misc_feature 6..15: note = DNA
  misc_feature 16..20: note = RNA
ttcgacaccaagatcccatt

SEQ ID NO: 4226 - DNA, 20 bp, synthetic construct
  source 1..20: mol_type = other DNA
  modified_base 1: mod_base = OTHER; note = 2'-O-methyluridine-3'-phosphorothioate
  modified_base 2: mod_base = OTHER; note = 2'-O-methylcytidine-3'- phosphorothioate
  modified_base 3: mod_base = OTHER; note = 2'-O-methylguanosine-3'- phosphorothioate
  modified_base 4: mod_base = OTHER; note = 2'-O-methyladenosine-3'- phosphorothioate
  modified_base 5: mod_base = OTHER; note = 2'-O-methylguanosine-3'- phosphorothioate
  modified_base 6: mod_base = OTHER; note = 5'-methyl-deoxycytidine-3'-phosphorothioate
  modified_base 7: mod_base = OTHER; note = 5'-methyl-deoxycytidine-3'-phosphorothioate
  modified_base 8: mod_base = OTHER; note = 5'-methyl-deoxycytidine-3'-phosphorothioate
  modified_base 9: mod_base = OTHER; note = 5'-methyl-deoxycytidine-3'-phosphorothioate
  modified_base 10: mod_base = OTHER; note = 2'-deoxyadenosine-3'-phosphorothioate
  modified_base 11: mod_base = OTHER; note = 2'-deoxythymidine-3'-phosphorothioate
  modified_base 12: mod_base = OTHER; note = 2'-deoxyguanosine-3'-phosphorothioate
  modified_base 13: mod_base = OTHER; note = 2'-deoxyadenosine-3'-phosphorothioate
  modified_base 14: mod_base = OTHER; note = 2'-deoxythymidine-3'-phosphorothioate
  modified_base 15: mod_base = OTHER; note = 2'-deoxythymidine-3'-phosphorothioate
  modified_base 16: mod_base = OTHER; note = 2'-O-methylcytidine-3'- phosphorothioate
  modified_base 17: mod_base = OTHER; note = 2'-O-methylguanosine-3'- phosphorothioate
  modified_base 18: mod_base = OTHER; note = 2'-O-methyladenosine-3'- phosphorothioate
  modified_base 19: mod_base = OTHER; note = 2'-O-methylcytidine-3'- phosphorothioate
  modified_base 20: mod_base = OTHER; note = 2'-O-methyladenosine-3'-phosphate
  misc_feature 1..5: note = RNA
  misc_feature 6..15: note = DNA
  misc_feature 16..20: note = RNA
tcgagccccatgattcgaca

SEQ ID NO: 4227 - DNA, 20 bp, synthetic construct
  source 1..20: mol_type = other DNA
  modified_base 1: mod_base = OTHER; note = 2'-O-methyladenosine-3'- phosphorothioate
  modified_base 2: mod_base = OTHER; note = 2'-O-methyluridine-3'-phosphorothioate
  modified_base 3: mod_base = OTHER; note = 2'-O-methylcytidine-3'- phosphorothioate
  modified_base 4: mod_base = OTHER; note = 2'-O-methylguanosine-3'- phosphorothioate
  modified_base 5: mod_base = OTHER; note = 2'-O-methyladenosine-3'- phosphorothioate
  modified_base 6: mod_base = OTHER; note = 2'-deoxyguanosine-3'-phosphorothioate
  modified_base 7: mod_base = OTHER; note = 2'-deoxythymidine-3'-phosphorothioate
  modified_base 8: mod_base = OTHER; note = 2'-deoxythymidine-3'-phosphorothioate
  modified_base 9: mod_base = OTHER; note = 2'-deoxyguanosine-3'-phosphorothioate
  modified_base 10: mod_base = OTHER; note = 2'-deoxythymidine-3'-phosphorothioate
  modified_base 11: mod_base = OTHER; note = 5'-methyl-deoxycytidine-3'-phosphorothioate
  modified_base 12: mod_base = OTHER; note = 2'-deoxyguanosine-3'-phosphorothioate
  modified_base 13: mod_base = OTHER; note = 2'-deoxyadenosine-3'-phosphorothioate
  modified_base 14: mod_base = OTHER; note = 2'-deoxyguanosine-3'-phosphorothioate
  modified_base 15: mod_base = OTHER; note = 5'-methyl-deoxycytidine-3'-phosphorothioate
  modified_base 16: mod_base = OTHER; note = 2'-O-methylcytidine-3'- phosphorothioate
  modified_base 17: mod_base = OTHER; note = 2'-O-methylcytidine-3'- phosphorothioate
  modified_base 18: mod_base = OTHER; note = 2'-O-methylcytidine-3'- phosphorothioate
  modified_base 19: mod_base = OTHER; note = 2'-O-methyladenosine-3'- phosphorothioate
  modified_base 20: mod_base = OTHER; note = 2'-O-methyluridine-3'-phosphate
  misc_feature 1..5: note = RNA
  misc_feature 6..15: note = DNA
  misc_feature 16..20: note = RNA
atcgagttgtcgagccccat

SEQ ID NO: 4228 - DNA, 20 bp, synthetic construct
  source 1..20: mol_type = other DNA
  modified_base 1: mod_base = OTHER; note = 2'-O-methylguanosine-3'- phosphorothioate
  modified_base 2: mod_base = OTHER; note = 2'-O-methylguanosine-3'- phosphorothioate
  modified_base 3: mod_base = OTHER; note = 2'-O-methylcytidine-3'- phosphorothioate
  modified_base 4: mod_base = OTHER; note = 2'-O-methyluridine-3'-phosphorothioate
  modified_base 5: mod_base = OTHER; note = 2'-O-methylguanosine-3'- phosphorothioate
  modified_base 6: mod_base = OTHER; note = 2'-deoxyguanosine-3'-phosphorothioate
  modified_base 7: mod_base = OTHER; note = 5'-methyl-deoxycytidine-3'-phosphorothioate
  modified_base 8: mod_base = OTHER; note = 2'-deoxyadenosine-3'-phosphorothioate
  modified_base 9: mod_base = OTHER; note = 5'-methyl-deoxycytidine-3'-phosphorothioate
  modified_base 10: mod_base = OTHER; note = 5'-methyl-deoxycytidine-3'-phosphorothioate
  modified_base 11: mod_base = OTHER; note = 5'-methyl-deoxycytidine-3'-phosphorothioate
  modified_base 12: mod_base = OTHER; note = 5'-methyl-deoxycytidine-3'-phosphorothioate
  modified_base 13: mod_base = OTHER; note = 2'-deoxyadenosine-3'-phosphorothioate
  modified_base 14: mod_base = OTHER; note = 2'-deoxythymidine-3'-phosphorothioate
  modified_base 15: mod_base = OTHER; note = 5'-methyl-deoxycytidine-3'-phosphorothioate
  modified_base 16: mod_base = OTHER; note = 2'-O-methylguanosine-3'- phosphorothioate
  modified_base 17: mod_base = OTHER; note = 2'-O-methyladenosine-3'- phosphorothioate
  modified_base 18: mod_base = OTHER; note = 2'-O-methylguanosine-3'- phosphorothioate
  modified_base 19: mod_base = OTHER; note = 2'-O-methyluridine-3'-phosphorothioate
  modified_base 20: mod_base = OTHER; note = 2'-O-methyluridine-3'-phosphate
  misc_feature 1..5: note = RNA
  misc_feature 6..15: note = DNA
  misc_feature 16..20: note = RNA
ggctggcaccccatcgagtt

SEQ ID NO: 4229 - DNA, 20 bp, synthetic construct
  source 1..20: mol_type = other DNA
  modified_base 1: mod_base = OTHER; note = 2'-O-methyladenosine-3'- phosphorothioate
  modified_base 2: mod_base = OTHER; note = 2'-O-methyladenosine-3'- phosphorothioate
  modified_base 3: mod_base = OTHER; note = 2'-O-methylcytidine-3'- phosphorothioate
  modified_base 4: mod_base = OTHER; note = 2'-O-methyladenosine-3'- phosphorothioate
  modified_base 5: mod_base = OTHER; note = 2'-O-methyluridine-3'-phosphorothioate
  modified_base 6: mod_base = OTHER; note = 5'-methyl-deoxycytidine-3'-phosphorothioate
  modified_base 7: mod_base = OTHER; note = 2'-deoxyadenosine-3'-phosphorothioate
  modified_base 8: mod_base = OTHER; note = 2'-deoxyadenosine-3'-phosphorothioate
  modified_base 9: mod_base = OTHER; note = 2'-deoxythymidine-3'-phosphorothioate
  modified_base 10: mod_base = OTHER; note = 2'-deoxyadenosine-3'-phosphorothioate
  modified_base 11: mod_base = OTHER; note = 2'-deoxyguanosine-3'-phosphorothioate
  modified_base 12: mod_base = OTHER; note = 2'-deoxythymidine-3'-phosphorothioate
  modified_base 13: mod_base = OTHER; note = 2'-deoxyguanosine-3'-phosphorothioate
  modified_base 14: mod_base = OTHER; note = 2'-deoxyguanosine-3'-phosphorothioate
  modified_base 15: mod_base = OTHER; note = 5'-methyl-deoxycytidine-3'-phosphorothioate
  modified_base 16: mod_base = OTHER; note = 2'-O-methyluridine-3'-phosphorothioate
  modified_base 17: mod_base = OTHER; note = 2'-O-methylguanosine-3'- phosphorothioate
  modified_base 18: mod_base = OTHER; note = 2'-O-methylguanosine-3'- phosphorothioate
  modified_base 19: mod_base = OTHER; note = 2'-O-methylcytidine-3'- phosphorothioate
  modified_base 20: mod_base = OTHER; note = 2'-O-methyladenosine-3'-phosphate
  misc_feature 1..5: note = RNA
  misc_feature 6..15: note = DNA
  misc_feature 16..20: note = RNA
aacatcaatagtggctggca

SEQ ID NO: 4230 - DNA, 20 bp, synthetic construct
  source 1..20: mol_type = other DNA
  modified_base 1: mod_base = OTHER; note = 2'-O-methyladenosine-3'- phosphorothioate
  modified_base 2: mod_base = OTHER; note = 2'-O-methyluridine-3'-phosphorothioate
  modified_base 3: mod_base = OTHER; note = 2'-O-methyluridine-3'-phosphorothioate
  modified_base 4: mod_base = OTHER; note = 2'-O-methyluridine-3'-phosphorothioate
  modified_base 5: mod_base = OTHER; note = 2'-O-methylcytidine-3'- phosphorothioate
  modified_base 6: mod_base = OTHER; note = 2'-deoxythymidine-3'-phosphorothioate
  modified_base 7: mod_base = OTHER; note = 2'-deoxyguanosine-3'-phosphorothioate
  modified_base 8: mod_base = OTHER; note = 2'-deoxyguanosine-3'-phosphorothioate
  modified_base 9: mod_base = OTHER; note = 5'-methyl-deoxycytidine-3'-phosphorothioate
  modified_base 10: mod_base = OTHER; note = 2'-deoxyadenosine-3'-phosphorothioate
  modified_base 11: mod_base = OTHER; note = 2'-deoxyguanosine-3'-phosphorothioate
  modified_base 12: mod_base = OTHER; note = 2'-deoxyadenosine-3'-phosphorothioate
  modified_base 13: mod_base = OTHER; note = 2'-deoxyadenosine-3'-phosphorothioate
  modified_base 14: mod_base = OTHER; note = 5'-methyl-deoxycytidine-3'-phosphorothioate
  modified_base 15: mod_base = OTHER; note = 2'-deoxyadenosine-3'-phosphorothioate
  modified_base 16: mod_base = OTHER; note = 2'-O-methyluridine-3'-phosphorothioate
  modified_base 17: mod_base = OTHER; note = 2'-O-methylcytidine-3'- phosphorothioate
  modified_base 18: mod_base = OTHER; note = 2'-O-methyladenosine-3'- phosphorothioate
  modified_base 19: mod_base = OTHER; note = 2'-O-methyladenosine-3'- phosphorothioate
  modified_base 20: mod_base = OTHER; note = 2'-O-methyluridine-3'-phosphate
  misc_feature 1..5: note = RNA
  misc_feature 6..15: note = DNA
  misc_feature 16..20: note = RNA
atttctggcagaacatcaat

SEQ ID NO: 4231 - DNA, 20 bp, synthetic construct
  source 1..20: mol_type = other DNA
  modified_base 1: mod_base = OTHER; note = 2'-O-methyladenosine-3'- phosphorothioate
  modified_base 2: mod_base = OTHER; note = 2'-O-methylguanosine-3'- phosphorothioate
  modified_base 3: mod_base = OTHER; note = 2'-O-methylcytidine-3'- phosphorothioate
  modified_base 4: mod_base = OTHER; note = 2'-O-methylcytidine-3'- phosphorothioate
  modified_base 5: mod_base = OTHER; note = 2'-O-methyluridine-3'-phosphorothioate
  modified_base 6: mod_base = OTHER; note = 5'-methyl-deoxycytidine-3'-phosphorothioate
  modified_base 7: mod_base = OTHER; note = 5'-methyl-deoxycytidine-3'-phosphorothioate
  modified_base 8: mod_base = OTHER; note = 2'-deoxyadenosine-3'-phosphorothioate
  modified_base 9: mod_base = OTHER; note = 5'-methyl-deoxycytidine-3'-phosphorothioate
  modified_base 10: mod_base = OTHER; note = 2'-deoxyadenosine-3'-phosphorothioate
  modified_base 11: mod_base = OTHER; note = 2'-deoxyadenosine-3'-phosphorothioate
  modified_base 12: mod_base = OTHER; note = 2'-deoxythymidine-3'-phosphorothioate
  modified_base 13: mod_base = OTHER; note = 2'-deoxythymidine-3'-phosphorothioate
  modified_base 14: mod_base = OTHER; note = 2'-deoxythymidine-3'-phosphorothioate
  modified_base 15: mod_base = OTHER; note = 5'-methyl-deoxycytidine-3'-phosphorothioate
  modified_base 16: mod_base = OTHER; note = 2'-O-methyluridine-3'-phosphorothioate
  modified_base 17: mod_base = OTHER; note = 2'-O-methylguanosine-3'- phosphorothioate
  modified_base 18: mod_base = OTHER; note = 2'-O-methylguanosine-3'- phosphorothioate
  modified_base 19: mod_base = OTHER; note = 2'-O-methylcytidine-3'- phosphorothioate
  modified_base 20: mod_base = OTHER; note = 2'-O-methyladenosine-3'-phosphate
  misc_feature 1..5: note = RNA
  misc_feature 6..15: note = DNA
  misc_feature 16..20: note = RNA
agcctccacaatttctggca

SEQ ID NO: 4232 - DNA, 20 bp, synthetic construct
  source 1..20: mol_type = other DNA
  modified_base 1: mod_base = OTHER; note = 2'-O-methylcytidine-3'- phosphorothioate
  modified_base 2: mod_base = OTHER; note = 2'-O-methyluridine-3'-phosphorothioate
  modified_base 3: mod_base = OTHER; note = 2'-O-methyluridine-3'-phosphorothioate
  modified_base 4: mod_base = OTHER; note = 2'-O-methylcytidine-3'- phosphorothioate
  modified_base 5: mod_base = OTHER; note = 2'-O-methylcytidine-3'- phosphorothioate
  modified_base 6: mod_base = OTHER; note = 5'-methyl-deoxycytidine-3'-phosphorothioate
  modified_base 7: mod_base = OTHER; note = 2'-deoxythymidine-3'-phosphorothioate
  modified_base 8: mod_base = OTHER; note = 2'-deoxythymidine-3'-phosphorothioate
  modified_base 9: mod_base = OTHER; note = 5'-methyl-deoxycytidine-3'-phosphorothioate
  modified_base 10: mod_base = OTHER; note = 5'-methyl-deoxycytidine-3'-phosphorothioate
  modified_base 11: mod_base = OTHER; note = 2'-deoxyadenosine-3'-phosphorothioate
  modified_base 12: mod_base = OTHER; note = 5'-methyl-deoxycytidine-3'-phosphorothioate
  modified_base 13: mod_base = OTHER; note = 2'-deoxyadenosine-3'-phosphorothioate
  modified_base 14: mod_base = OTHER; note = 2'-deoxyguanosine-3'-phosphorothioate
  modified_base 15: mod_base = OTHER; note = 5'-methyl-deoxycytidine-3'-phosphorothioate
  modified_base 16: mod_base = OTHER; note = 2'-O-methylcytidine-3'- phosphorothioate
  modified_base 17: mod_base = OTHER; note = 2'-O-methyluridine-3'-phosphorothioate
  modified_base 18: mod_base = OTHER; note = 2'-O-methylcytidine-3'- phosphorothioate
  modified_base 19: mod_base = OTHER; note = 2'-O-methylcytidine-3'- phosphorothioate
  modified_base 20: mod_base = OTHER; note = 2'-O-methyladenosine-3'-phosphate
  misc_feature 1..5: note = RNA
  misc_feature 6..15: note = DNA
  misc_feature 16..20: note = RNA
cttcccttccacagcctcca

SEQ ID NO: 4233 - DNA, 20 bp, synthetic construct
  source 1..20: mol_type = other DNA
  modified_base 1: mod_base = OTHER; note = 2'-O-methyladenosine-3'- phosphorothioate
  modified_base 2: mod_base = OTHER; note = 2'-O-methyladenosine-3'- phosphorothioate
  modified_base 3: mod_base = OTHER; note = 2'-O-methylguanosine-3'- phosphorothioate
  modified_base 4: mod_base = OTHER; note = 2'-O-methyladenosine-3'- phosphorothioate
  modified_base 5: mod_base = OTHER; note = 2'-O-methylcytidine-3'- phosphorothioate
  modified_base 6: mod_base = OTHER; note = 2'-deoxythymidine-3'-phosphorothioate
  modified_base 7: mod_base = OTHER; note = 2'-deoxythymidine-3'-phosphorothioate
  modified_base 8: mod_base = OTHER; note = 5'-methyl-deoxycytidine-3'-phosphorothioate
  modified_base 9: mod_base = OTHER; note = 5'-methyl-deoxycytidine-3'-phosphorothioate
  modified_base 10: mod_base = OTHER; note = 2'-deoxyadenosine-3'-phosphorothioate
  modified_base 11: mod_base = OTHER; note = 5'-methyl-deoxycytidine-3'-phosphorothioate
  modified_base 12: mod_base = OTHER; note = 5'-methyl-deoxycytidine-3'-phosphorothioate
  modified_base 13: mod_base = OTHER; note = 2'-deoxythymidine-3'-phosphorothioate
  modified_base 14: mod_base = OTHER; note = 2'-deoxythymidine-3'-phosphorothioate
  modified_base 15: mod_base = OTHER; note = 5'-methyl-deoxycytidine-3'-phosphorothioate
  modified_base 16: mod_base = OTHER; note = 2'-O-methylcytidine-3'- phosphorothioate
  modified_base 17: mod_base = OTHER; note = 2'-O-methylcytidine-3'- phosphorothioate
  modified_base 18: mod_base = OTHER; note = 2'-O-methyluridine-3'-phosphorothioate
  modified_base 19: mod_base = OTHER; note = 2'-O-methyluridine-3'-phosphorothioate
  modified_base 20: mod_base = OTHER; note = 2'-O-methylcytidine-3'-phosphate
  misc_feature 1..5: note = RNA
  misc_feature 6..15: note = DNA
  misc_feature 16..20: note = RNA
aagacttccaccttcccttc

SEQ ID NO: 4234 - DNA, 20 bp, synthetic construct
  source 1..20: mol_type = other DNA
  modified_base 1: mod_base = OTHER; note = 2'-O-methylcytidine-3'- phosphorothioate
  modified_base 2: mod_base = OTHER; note = 2'-O-methylcytidine-3'- phosphorothioate
  modified_base 3: mod_base = OTHER; note = 2'-O-methylguanosine-3'- phosphorothioate
  modified_base 4: mod_base = OTHER; note = 2'-O-methyluridine-3'-phosphorothioate
  modified_base 5: mod_base = OTHER; note = 2'-O-methylcytidine-3'- phosphorothioate
  modified_base 6: mod_base = OTHER; note = 5'-methyl-deoxycytidine-3'-phosphorothioate
  modified_base 7: mod_base = OTHER; note = 2'-deoxyadenosine-3'-phosphorothioate
  modified_base 8: mod_base = OTHER; note = 2'-deoxyguanosine-3'-phosphorothioate
  modified_base 9: mod_base = OTHER; note = 2'-deoxyguanosine-3'-phosphorothioate
  modified_base 10: mod_base = OTHER; note = 2'-deoxyadenosine-3'-phosphorothioate
  modified_base 11: mod_base = OTHER; note = 2'-deoxyadenosine-3'-phosphorothioate
  modified_base 12: mod_base = OTHER; note = 2'-deoxyguanosine-3'-phosphorothioate
  modified_base 13: mod_base = OTHER; note = 2'-deoxyadenosine-3'-phosphorothioate
  modified_base 14: mod_base = OTHER; note = 5'-methyl-deoxycytidine-3'-phosphorothioate
  modified_base 15: mod_base = OTHER; note = 2'-deoxythymidine-3'-phosphorothioate
  modified_base 16: mod_base = OTHER; note = 2'-O-methyluridine-3'-phosphorothioate
  modified_base 17: mod_base = OTHER; note = 2'-O-methylcytidine-3'- phosphorothioate
  modified_base 18: mod_base = OTHER; note = 2'-O-methylcytidine-3'- phosphorothioate
  modified_base 19: mod_base = OTHER; note = 2'-O-methyladenosine-3'- phosphorothioate
  modified_base 20: mod_base = OTHER; note = 2'-O-methylcytidine-3'-phosphate
  misc_feature 1..5: note = RNA
  misc_feature 6..15: note = DNA
  misc_feature 16..20: note = RNA
ccgtccaggaagacttccac

SEQ ID NO: 4235 - DNA, 20 bp, synthetic construct
  source 1..20: mol_type = other DNA
  modified_base 1: mod_base = OTHER; note = 2'-O-methyluridine-3'-phosphorothioate
  modified_base 2: mod_base = OTHER; note = 2'-O-methylcytidine-3'- phosphorothioate
  modified_base 3: mod_base = OTHER; note = 2'-O-methylcytidine-3'- phosphorothioate
  modified_base 4: mod_base = OTHER; note = 2'-O-methylguanosine-3'- phosphorothioate
  modified_base 5: mod_base = OTHER; note = 2'-O-methylcytidine-3'- phosphorothioate
  modified_base 6: mod_base = OTHER; note = 2'-deoxyadenosine-3'-phosphorothioate
  modified_base 7: mod_base = OTHER; note = 5'-methyl-deoxycytidine-3'-phosphorothioate
  modified_base 8: mod_base = OTHER; note = 2'-deoxyadenosine-3'-phosphorothioate
  modified_base 9: mod_base = OTHER; note = 5'-methyl-deoxycytidine-3'-phosphorothioate
  modified_base 10: mod_base = OTHER; note = 5'-methyl-deoxycytidine-3'-phosphorothioate
  modified_base 11: mod_base = OTHER; note = 5'-methyl-deoxycytidine-3'-phosphorothioate
  modified_base 12: mod_base = OTHER; note = 5'-methyl-deoxycytidine-3'-phosphorothioate
  modified_base 13: mod_base = OTHER; note = 5'-methyl-deoxycytidine-3'-phosphorothioate
  modified_base 14: mod_base = OTHER; note = 2'-deoxyguanosine-3'-phosphorothioate
  modified_base 15: mod_base = OTHER; note = 2'-deoxythymidine-3'-phosphorothioate
  modified_base 16: mod_base = OTHER; note = 2'-O-methylcytidine-3'- phosphorothioate
  modified_base 17: mod_base = OTHER; note = 2'-O-methylcytidine-3'- phosphorothioate
  modified_base 18: mod_base = OTHER; note = 2'-O-methyladenosine-3'- phosphorothioate
  modified_base 19: mod_base = OTHER; note = 2'-O-methylguanosine-3'- phosphorothioate
  modified_base 20: mod_base = OTHER; note = 2'-O-methylguanosine-3'-phosphate
  misc_feature 1..5: note = RNA
  misc_feature 6..15: note = DNA
  misc_feature 16..20: note = RNA
tccgcacacccccgtccagg

SEQ ID NO: 4236 - DNA, 20 bp, synthetic construct
  source 1..20: mol_type = other DNA
  modified_base 1: mod_base = OTHER; note = 2'-O-methylcytidine-3'- phosphorothioate
  modified_base 2: mod_base = OTHER; note = 2'-O-methyladenosine-3'- phosphorothioate
  modified_base 3: mod_base = OTHER; note = 2'-O-methyluridine-3'-phosphorothioate
  modified_base 4: mod_base = OTHER; note = 2'-O-methylcytidine-3'- phosphorothioate
  modified_base 5: mod_base = OTHER; note = 2'-O-methyladenosine-3'- phosphorothioate
  modified_base 6: mod_base = OTHER; note = 2'-deoxyguanosine-3'-phosphorothioate
  modified_base 7: mod_base = OTHER; note = 2'-deoxythymidine-3'-phosphorothioate
  modified_base 8: mod_base = OTHER; note = 2'-deoxyguanosine-3'-phosphorothioate
  modified_base 9: mod_base = OTHER; note = 5'-methyl-deoxycytidine-3'-phosphorothioate
  modified_base 10: mod_base = OTHER; note = 5'-methyl-deoxycytidine-3'-phosphorothioate
  modified_base 11: mod_base = OTHER; note = 2'-deoxythymidine-3'-phosphorothioate
  modified_base 12: mod_base = OTHER; note = 2'-deoxythymidine-3'-phosphorothioate
  modified_base 13: mod_base = OTHER; note = 2'-deoxythymidine-3'-phosphorothioate
  modified_base 14: mod_base = OTHER; note = 5'-methyl-deoxycytidine-3'-phosphorothioate
  modified_base 15: mod_base = OTHER; note = 5'-methyl-deoxycytidine-3'-phosphorothioate
  modified_base 16: mod_base = OTHER; note = 2'-O-methylguanosine-3'- phosphorothioate
  modified_base 17: mod_base = OTHER; note = 2'-O-methylcytidine-3'- phosphorothioate
  modified_base 18: mod_base = OTHER; note = 2'-O-methyladenosine-3'- phosphorothioate
  modified_base 19: mod_base = OTHER; note = 2'-O-methylcytidine-3'- phosphorothioate
  modified_base 20: mod_base = OTHER; note = 2'-O-methyladenosine-3'-phosphate
  misc_feature 1..5: note = RNA
  misc_feature 6..15: note = DNA
  misc_feature 16..20: note = RNA
catcagtgcctttccgcaca

SEQ ID NO: 4237 - DNA, 20 bp, synthetic construct
  source 1..20: mol_type = other DNA
  modified_base 1: mod_base = OTHER; note = 2'-O-methyladenosine-3'- phosphorothioate
  modified_base 2: mod_base = OTHER; note = 2'-O-methylguanosine-3'- phosphorothioate
  modified_base 3: mod_base = OTHER; note = 2'-O-methylcytidine-3'- phosphorothioate
  modified_base 4: mod_base = OTHER; note = 2'-O-methyluridine-3'-phosphorothioate
  modified_base 5: mod_base = OTHER; note = 2'-O-methyluridine-3'-phosphorothioate
  modified_base 6: mod_base = OTHER; note = 2'-deoxythymidine-3'-phosphorothioate
  modified_base 7: mod_base = OTHER; note = 5'-methyl-deoxycytidine-3'-phosphorothioate
  modified_base 8: mod_base = OTHER; note = 2'-deoxyadenosine-3'-phosphorothioate
  modified_base 9: mod_base = OTHER; note = 2'-deoxyguanosine-3'-phosphorothioate
  modified_base 10: mod_base = OTHER; note = 2'-deoxyadenosine-3'-phosphorothioate
  modified_base 11: mod_base = OTHER; note = 2'-deoxyadenosine-3'-phosphorothioate
  modified_base 12: mod_base = OTHER; note = 5'-methyl-deoxycytidine-3'-phosphorothioate
  modified_base 13: mod_base = OTHER; note = 2'-deoxyadenosine-3'-phosphorothioate
  modified_base 14: mod_base = OTHER; note = 2'-deoxythymidine-3'-phosphorothioate
  modified_base 15: mod_base = OTHER; note = 5'-methyl-deoxycytidine-3'-phosphorothioate
  modified_base 16: mod_base = OTHER; note = 2'-O-methyladenosine-3'- phosphorothioate
  modified_base 17: mod_base = OTHER; note = 2'-O-methylguanosine-3'- phosphorothioate
  modified_base 18: mod_base = OTHER; note = 2'-O-methyluridine-3'-phosphorothioate
  modified_base 19: mod_base = OTHER; note = 2'-O-methylguanosine-3'- phosphorothioate
  modified_base 20: mod_base = OTHER; note = 2'-O-methylcytidine-3'-phosphate
  misc_feature 1..5: note = RNA
  misc_feature 6..15: note = DNA
  misc_feature 16..20: note = RNA
agctttcagaacatcagtgc

SEQ ID NO: 4238 - DNA, 20 bp, synthetic construct
  source 1..20: mol_type = other DNA
  modified_base 1: mod_base = OTHER; note = 2'-O-methylcytidine-3'- phosphorothioate
  modified_base 2: mod_base = OTHER; note = 2'-O-methyladenosine-3'- phosphorothioate
  modified_base 3: mod_base = OTHER; note = 2'-O-methyladenosine-3'- phosphorothioate
  modified_base 4: mod_base = OTHER; note = 2'-O-methylguanosine-3'- phosphorothioate
  modified_base 5: mod_base = OTHER; note = 2'-O-methyladenosine-3'- phosphorothioate
  modified_base 6: mod_base = OTHER; note = 2'-deoxyguanosine-3'-phosphorothioate
  modified_base 7: mod_base = OTHER; note = 5'-methyl-deoxycytidine-3'-phosphorothioate
  modified_base 8: mod_base = OTHER; note = 5'-methyl-deoxycytidine-3'-phosphorothioate
  modified_base 9: mod_base = OTHER; note = 2'-deoxyadenosine-3'-phosphorothioate
  modified_base 10: mod_base = OTHER; note = 2'-deoxyguanosine-3'-phosphorothioate
  modified_base 11: mod_base = OTHER; note = 2'-deoxyadenosine-3'-phosphorothioate
  modified_base 12: mod_base = OTHER; note = 2'-deoxyguanosine-3'-phosphorothioate
  modified_base 13: mod_base = OTHER; note = 5'-methyl-deoxycytidine-3'-phosphorothioate
  modified_base 14: mod_base = OTHER; note = 2'-deoxythymidine-3'-phosphorothioate
  modified_base 15: mod_base = OTHER; note = 2'-deoxythymidine-3'-phosphorothioate
  modified_base 16: mod_base = OTHER; note = 2'-O-methyluridine-3'-phosphorothioate
  modified_base 17: mod_base = OTHER; note = 2'-O-methylcytidine-3'- phosphorothioate
  modified_base 18: mod_base = OTHER; note = 2'-O-methyladenosine-3'- phosphorothioate
  modified_base 19: mod_base = OTHER; note = 2'-O-methylguanosine-3'- phosphorothioate
  modified_base 20: mod_base = OTHER; note = 2'-O-methyladenosine-3'-phosphate
  misc_feature 1..5: note = RNA
  misc_feature 6..15: note = DNA
  misc_feature 16..20: note = RNA
caagagccagagctttcaga

SEQ ID NO: 4239 - DNA, 20 bp, synthetic construct
  source 1..20: mol_type = other DNA
  modified_base 1: mod_base = OTHER; note = 2'-O-methyladenosine-3'- phosphorothioate
  modified_base 2: mod_base = OTHER; note = 2'-O-methylcytidine-3'- phosphorothioate
  modified_base 3: mod_base = OTHER; note = 2'-O-methyladenosine-3'- phosphorothioate
  modified_base 4: mod_base = OTHER; note = 2'-O-methylguanosine-3'- phosphorothioate
  modified_base 5: mod_base = OTHER; note = 2'-O-methylcytidine-3'- phosphorothioate
  modified_base 6: mod_base = OTHER; note = 5'-methyl-deoxycytidine-3'-phosphorothioate
  modified_base 7: mod_base = OTHER; note = 2'-deoxythymidine-3'-phosphorothioate
  modified_base 8: mod_base = OTHER; note = 2'-deoxythymidine-3'-phosphorothioate
  modified_base 9: mod_base = OTHER; note = 2'-deoxyguanosine-3'-phosphorothioate
  modified_base 10: mod_base = OTHER; note = 2'-deoxyguanosine-3'-phosphorothioate
  modified_base 11: mod_base = OTHER; note = 5'-methyl-deoxycytidine-3'-phosphorothioate
  modified_base 12: mod_base = OTHER; note = 2'-deoxyguanosine-3'-phosphorothioate
  modified_base 13: mod_base = OTHER; note = 5'-methyl-deoxycytidine-3'-phosphorothioate
  modified_base 14: mod_base = OTHER; note = 5'-methyl-deoxycytidine-3'-phosphorothioate
  modified_base 15: mod_base = OTHER; note = 2'-deoxyadenosine-3'-phosphorothioate
  modified_base 16: mod_base = OTHER; note = 2'-O-methyladenosine-3'- phosphorothioate
  modified_base 17: mod_base = OTHER; note = 2'-O-methylguanosine-3'- phosphorothioate
  modified_base 18: mod_base = OTHER; note = 2'-O-methyladenosine-3'- phosphorothioate
  modified_base 19: mod_base = OTHER; note = 2'-O-methylguanosine-3'- phosphorothioate
  modified_base 20: mod_base = OTHER; note = 2'-O-methylcytidine-3'-phosphate
  misc_feature 1..5: note = RNA
  misc_feature 6..15: note = DNA
  misc_feature 16..20: note = RNA
acagccttggcgccaagagc

SEQ ID NO: 4240 - DNA, 20 bp, synthetic construct
  source 1..20: mol_type = other DNA
  modified_base 1: mod_base = OTHER; note = 2'-O-methyluridine-3'-phosphorothioate
  modified_base 2: mod_base = OTHER; note = 2'-O-methylcytidine-3'- phosphorothioate
  modified_base 3: mod_base = OTHER; note = 2'-O-methylcytidine-3'- phosphorothioate
  modified_base 4: mod_base = OTHER; note = 2'-O-methylcytidine-3'- phosphorothioate
  modified_base 5: mod_base = OTHER; note = 2'-O-methylcytidine-3'- phosphorothioate
  modified_base 6: mod_base = OTHER; note = 2'-deoxyadenosine-3'-phosphorothioate
  modified_base 7: mod_base = OTHER; note = 5'-methyl-deoxycytidine-3'-phosphorothioate
  modified_base 8: mod_base = OTHER; note = 2'-deoxyadenosine-3'-phosphorothioate
  modified_base 9: mod_base = OTHER; note = 2'-deoxyadenosine-3'-phosphorothioate
  modified_base 10: mod_base = OTHER; note = 2'-deoxyadenosine-3'-phosphorothioate
  modified_base 11: mod_base = OTHER; note = 5'-methyl-deoxycytidine-3'-phosphorothioate
  modified_base 12: mod_base = OTHER; note = 2'-deoxyadenosine-3'-phosphorothioate
  modified_base 13: mod_base = OTHER; note = 5'-methyl-deoxycytidine-3'-phosphorothioate
  modified_base 14: mod_base = OTHER; note = 2'-deoxyadenosine-3'-phosphorothioate
  modified_base 15: mod_base = OTHER; note = 2'-deoxyguanosine-3'-phosphorothioate
  modified_base 16: mod_base = OTHER; note = 2'-O-methylcytidine-3'- phosphorothioate
  modified_base 17: mod_base = OTHER; note = 2'-O-methylcytidine-3'- phosphorothioate
  modified_base 18: mod_base = OTHER; note = 2'-O-methyluridine-3'-phosphorothioate
  modified_base 19: mod_base = OTHER; note = 2'-O-methyluridine-3'-phosphorothioate
  modified_base 20: mod_base = OTHER; note = 2'-O-methylguanosine-3'-phosphate
  misc_feature 1..5: note = RNA
  misc_feature 6..15: note = DNA
  misc_feature 16..20: note = RNA
tccccacaaacacagccttg

SEQ ID NO: 4241 - DNA, 20 bp, synthetic construct
  source 1..20: mol_type = other DNA
  modified_base 1: mod_base = OTHER; note = 2'-O-methyladenosine-3'- phosphorothioate
  modified_base 2: mod_base = OTHER; note = 2'-O-methylcytidine-3'- phosphorothioate
  modified_base 3: mod_base = OTHER; note = 2'-O-methylguanosine-3'- phosphorothioate
  modified_base 4: mod_base = OTHER; note = 2'-O-methyladenosine-3'- phosphorothioate
  modified_base 5: mod_base = OTHER; note = 2'-O-methyluridine-3'-phosphorothioate
  modified_base 6: mod_base = OTHER; note = 2'-deoxythymidine-3'-phosphorothioate
  modified_base 7: mod_base = OTHER; note = 2'-deoxyguanosine-3'-phosphorothioate
  modified_base 8: mod_base = OTHER; note = 2'-deoxyguanosine-3'-phosphorothioate
  modified_base 9: mod_base = OTHER; note = 2'-deoxythymidine-3'-phosphorothioate
  modified_base 10: mod_base = OTHER; note = 5'-methyl-deoxycytidine-3'-phosphorothioate
  modified_base 11: mod_base = OTHER; note = 2'-deoxythymidine-3'-phosphorothioate
  modified_base 12: mod_base = OTHER; note = 5'-methyl-deoxycytidine-3'-phosphorothioate
  modified_base 13: mod_base = OTHER; note = 5'-methyl-deoxycytidine-3'-phosphorothioate
  modified_base 14: mod_base = OTHER; note = 5'-methyl-deoxycytidine-3'-phosphorothioate
  modified_base 15: mod_base = OTHER; note = 5'-methyl-deoxycytidine-3'-phosphorothioate
  modified_base 16: mod_base = OTHER; note = 2'-O-methyladenosine-3'- phosphorothioate
  modified_base 17: mod_base = OTHER; note = 2'-O-methylcytidine-3'- phosphorothioate
  modified_base 18: mod_base = OTHER; note = 2'-O-methyladenosine-3'- phosphorothioate
  modified_base 19: mod_base = OTHER; note = 2'-O-methyladenosine-3'- phosphorothioate
  modified_base 20: mod_base = OTHER; note = 2'-O-methyladenosine-3'-phosphate
  misc_feature 1..5: note = RNA
  misc_feature 6..15: note = DNA
  misc_feature 16..20: note = RNA
acgattggtctccccacaaa

SEQ ID NO: 4242 - DNA, 20 bp, synthetic construct
  source 1..20: mol_type = other DNA
  modified_base 1: mod_base = OTHER; note = 2'-O-methyluridine-3'-phosphorothioate
  modified_base 2: mod_base = OTHER; note = 2'-O-methyladenosine-3'- phosphorothioate
  modified_base 3: mod_base = OTHER; note = 2'-O-methyladenosine-3'- phosphorothioate
  modified_base 4: mod_base = OTHER; note = 2'-O-methylguanosine-3'- phosphorothioate
  modified_base 5: mod_base = OTHER; note = 2'-O-methylcytidine-3'- phosphorothioate
  modified_base 6: mod_base = OTHER; note = 5'-methyl-deoxycytidine-3'-phosphorothioate
  modified_base 7: mod_base = OTHER; note = 5'-methyl-deoxycytidine-3'-phosphorothioate
  modified_base 8: mod_base = OTHER; note = 5'-methyl-deoxycytidine-3'-phosphorothioate
  modified_base 9: mod_base = OTHER; note = 2'-deoxyadenosine-3'-phosphorothioate
  modified_base 10: mod_base = OTHER; note = 2'-deoxyadenosine-3'-phosphorothioate
  modified_base 11: mod_base = OTHER; note = 2'-deoxyadenosine-3'-phosphorothioate
  modified_base 12: mod_base = OTHER; note = 5'-methyl-deoxycytidine-3'-phosphorothioate
  modified_base 13: mod_base = OTHER; note = 2'-deoxyguanosine-3'-phosphorothioate
  modified_base 14: mod_base = OTHER; note = 2'-deoxyadenosine-3'-phosphorothioate
  modified_base 15: mod_base = OTHER; note = 2'-deoxythymidine-3'-phosphorothioate
  modified_base 16: mod_base = OTHER; note = 2'-O-methyluridine-3'-phosphorothioate
  modified_base 17: mod_base = OTHER; note = 2'-O-methylguanosine-3'- phosphorothioate
  modified_base 18: mod_base = OTHER; note = 2'-O-methylguanosine-3'- phosphorothioate
  modified_base 19: mod_base = OTHER; note = 2'-O-methyluridine-3'-phosphorothioate
  modified_base 20: mod_base = OTHER; note = 2'-O-methylcytidine-3'-phosphate
  misc_feature 1..5: note = RNA
  misc_feature 6..15: note = DNA
  misc_feature 16..20: note = RNA
taagccccaaacgattggtc

SEQ ID NO: 4243 - DNA, 20 bp, synthetic construct
  source 1..20: mol_type = other DNA
  modified_base 1: mod_base = OTHER; note = 2'-O-methylcytidine-3'- phosphorothioate
  modified_base 2: mod_base = OTHER; note = 2'-O-methylcytidine-3'- phosphorothioate
  modified_base 3: mod_base = OTHER; note = 2'-O-methylcytidine-3'- phosphorothioate
  modified_base 4: mod_base = OTHER; note = 2'-O-methyluridine-3'-phosphorothioate
  modified_base 5: mod_base = OTHER; note = 2'-O-methylguanosine-3'- phosphorothioate
  modified_base 6: mod_base = OTHER; note = 2'-deoxyguanosine-3'-phosphorothioate
  modified_base 7: mod_base = OTHER; note = 2'-deoxyadenosine-3'-phosphorothioate
  modified_base 8: mod_base = OTHER; note = 2'-deoxyadenosine-3'-phosphorothioate
  modified_base 9: mod_base = OTHER; note = 2'-deoxyadenosine-3'-phosphorothioate
  modified_base 10: mod_base = OTHER; note = 2'-deoxyguanosine-3'-phosphorothioate
  modified_base 11: mod_base = OTHER; note = 5'-methyl-deoxycytidine-3'-phosphorothioate
  modified_base 12: mod_base = OTHER; note = 2'-deoxythymidine-3'-phosphorothioate
  modified_base 13: mod_base = OTHER; note = 2'-deoxyadenosine-3'-phosphorothioate
  modified_base 14: mod_base = OTHER; note = 2'-deoxyadenosine-3'-phosphorothioate
  modified_base 15: mod_base = OTHER; note = 2'-deoxyguanosine-3'-phosphorothioate
  modified_base 16: mod_base = OTHER; note = 2'-O-methylcytidine-3'- phosphorothioate
  modified_base 17: mod_base = OTHER; note = 2'-O-methylcytidine-3'- phosphorothioate
  modified_base 18: mod_base = OTHER; note = 2'-O-methylcytidine-3'- phosphorothioate
  modified_base 19: mod_base = OTHER; note = 2'-O-methylcytidine-3'- phosphorothioate
  modified_base 20: mod_base = OTHER; note = 2'-O-methyladenosine-3'-phosphate
  misc_feature 1..5: note = RNA
  misc_feature 6..15: note = DNA
  misc_feature 16..20: note = RNA
ccctggaaagctaagcccca

SEQ ID NO: 4244 - DNA, 20 bp, synthetic construct
  source 1..20: mol_type = other DNA
  modified_base 1: mod_base = OTHER; note = 2'-O-methylcytidine-3'- phosphorothioate
  modified_base 2: mod_base = OTHER; note = 2'-O-methyladenosine-3'- phosphorothioate
  modified_base 3: mod_base = OTHER; note = 2'-O-methylcytidine-3'- phosphorothioate
  modified_base 4: mod_base = OTHER; note = 2'-O-methylcytidine-3'- phosphorothioate
  modified_base 5: mod_base = OTHER; note = 2'-O-methyluridine-3'-phosphorothioate
  modified_base 6: mod_base = OTHER; note = 2'-deoxythymidine-3'-phosphorothioate
  modified_base 7: mod_base = OTHER; note = 2'-deoxythymidine-3'-phosphorothioate
  modified_base 8: mod_base = OTHER; note = 5'-methyl-deoxycytidine-3'-phosphorothioate
  modified_base 9: mod_base = OTHER; note = 2'-deoxythymidine-3'-phosphorothioate
  modified_base 10: mod_base = OTHER; note = 5'-methyl-deoxycytidine-3'-phosphorothioate
  modified_base 11: mod_base = OTHER; note = 5'-methyl-deoxycytidine-3'-phosphorothioate
  modified_base 12: mod_base = OTHER; note = 5'-methyl-deoxycytidine-3'-phosphorothioate
  modified_base 13: mod_base = OTHER; note = 5'-methyl-deoxycytidine-3'-phosphorothioate
  modified_base 14: mod_base = OTHER; note = 5'-methyl-deoxycytidine-3'-phosphorothioate
  modified_base 15: mod_base = OTHER; note = 2'-deoxythymidine-3'-phosphorothioate
  modified_base 16: mod_base = OTHER; note = 2'-O-methylguanosine-3'- phosphorothioate
  modified_base 17: mod_base = OTHER; note = 2'-O-methylguanosine-3'- phosphorothioate
  modified_base 18: mod_base = OTHER; note = 2'-O-methyladenosine-3'- phosphorothioate
  modified_base 19: mod_base = OTHER; note = 2'-O-methyladenosine-3'- phosphorothioate
  modified_base 20: mod_base = OTHER; note = 2'-O-methyladenosine-3'-phosphate
  misc_feature 1..5: note = RNA
  misc_feature 6..15: note = DNA
  misc_feature 16..20: note = RNA
cacctttctccccctggaaa

SEQ ID NO: 4245 - DNA, 20 bp, synthetic construct
  source 1..20: mol_type = other DNA
  modified_base 1: mod_base = OTHER; note = 2'-O-methylguanosine-3'- phosphorothioate
  modified_base 2: mod_base = OTHER; note = 2'-O-methyladenosine-3'- phosphorothioate
  modified_base 3: mod_base = OTHER; note = 2'-O-methylcytidine-3'- phosphorothioate
  modified_base 4: mod_base = OTHER; note = 2'-O-methyladenosine-3'- phosphorothioate
  modified_base 5: mod_base = OTHER; note = 2'-O-methyluridine-3'-phosphorothioate
  modified_base 6: mod_base = OTHER; note = 5'-methyl-deoxycytidine-3'-phosphorothioate
  modified_base 7: mod_base = OTHER; note = 2'-deoxythymidine-3'-phosphorothioate
  modified_base 8: mod_base = OTHER; note = 2'-deoxythymidine-3'-phosphorothioate
  modified_base 9: mod_base = OTHER; note = 2'-deoxyguanosine-3'-phosphorothioate
  modified_base 10: mod_base = OTHER; note = 2'-deoxyadenosine-3'-phosphorothioate
  modified_base 11: mod_base = OTHER; note = 2'-deoxyadenosine-3'-phosphorothioate
  modified_base 12: mod_base = OTHER; note = 5'-methyl-deoxycytidine-3'-phosphorothioate
  modified_base 13: mod_base = OTHER; note = 2'-deoxyadenosine-3'-phosphorothioate
  modified_base 14: mod_base = OTHER; note = 5'-methyl-deoxycytidine-3'-phosphorothioate
  modified_base 15: mod_base = OTHER; note = 5'-methyl-deoxycytidine-3'-phosphorothioate
  modified_base 16: mod_base = OTHER; note = 2'-O-methyluridine-3'-phosphorothioate
  modified_base 17: mod_base = OTHER; note = 2'-O-methyluridine-3'-phosphorothioate
  modified_base 18: mod_base = OTHER; note = 2'-O-methyluridine-3'-phosphorothioate
  modified_base 19: mod_base = OTHER; note = 2'-O-methylcytidine-3'- phosphorothioate
  modified_base 20: mod_base = OTHER; note = 2'-O-methyluridine-3'-phosphate
  misc_feature 1..5: note = RNA
  misc_feature 6..15: note = DNA
  misc_feature 16..20: note = RNA
gacatcttgaacacctttct

SEQ ID NO: 4246 - DNA, 20 bp, synthetic construct
  source 1..20: mol_type = other DNA
  modified_base 1: mod_base = OTHER; note = 2'-O-methyluridine-3'-phosphorothioate
  modified_base 2: mod_base = OTHER; note = 2'-O-methyladenosine-3'- phosphorothioate
  modified_base 3: mod_base = OTHER; note = 2'-O-methylguanosine-3'- phosphorothioate
  modified_base 4: mod_base = OTHER; note = 2'-O-methyluridine-3'-phosphorothioate
  modified_base 5: mod_base = OTHER; note = 2'-O-methyladenosine-3'- phosphorothioate
  modified_base 6: mod_base = OTHER; note = 2'-deoxythymidine-3'-phosphorothioate
  modified_base 7: mod_base = OTHER; note = 5'-methyl-deoxycytidine-3'-phosphorothioate
  modified_base 8: mod_base = OTHER; note = 2'-deoxythymidine-3'-phosphorothioate
  modified_base 9: mod_base = OTHER; note = 5'-methyl-deoxycytidine-3'-phosphorothioate
  modified_base 10: mod_base = OTHER; note = 2'-deoxyguanosine-3'-phosphorothioate
  modified_base 11: mod_base = OTHER; note = 2'-deoxyadenosine-3'-phosphorothioate
  modified_base 12: mod_base = OTHER; note = 2'-deoxyguanosine-3'-phosphorothioate
  modified_base 13: mod_base = OTHER; note = 2'-deoxyguanosine-3'-phosphorothioate
  modified_base 14: mod_base = OTHER; note = 2'-deoxyadenosine-3'-phosphorothioate
  modified_base 15: mod_base = OTHER; note = 5'-methyl-deoxycytidine-3'-phosphorothioate
  modified_base 16: mod_base = OTHER; note = 2'-O-methyladenosine-3'- phosphorothioate
  modified_base 17: mod_base = OTHER; note = 2'-O-methyluridine-3'-phosphorothioate
  modified_base 18: mod_base = OTHER; note = 2'-O-methylcytidine-3'- phosphorothioate
  modified_base 19: mod_base = OTHER; note = 2'-O-methyluridine-3'-phosphorothioate
  modified_base 20: mod_base = OTHER; note = 2'-O-methyluridine-3'-phosphate
  misc_feature 1..5: note = RNA
  misc_feature 6..15: note = DNA
  misc_feature 16..20: note = RNA
tagtatctcgaggacatctt

SEQ ID NO: 4247 - DNA, 20 bp, synthetic construct
  source 1..20: mol_type = other DNA
  modified_base 1: mod_base = OTHER; note = 2'-O-methylguanosine-3'- phosphorothioate
  modified_base 2: mod_base = OTHER; note = 2'-O-methyladenosine-3'- phosphorothioate
  modified_base 3: mod_base = OTHER; note = 2'-O-methyladenosine-3'- phosphorothioate
  modified_base 4: mod_base = OTHER; note = 2'-O-methyluridine-3'-phosphorothioate
  modified_base 5: mod_base = OTHER; note = 2'-O-methyluridine-3'-phosphorothioate
  modified_base 6: mod_base = OTHER; note = 5'-methyl-deoxycytidine-3'-phosphorothioate
  modified_base 7: mod_base = OTHER; note = 2'-deoxythymidine-3'-phosphorothioate
  modified_base 8: mod_base = OTHER; note = 2'-deoxythymidine-3'-phosphorothioate
  modified_base 9: mod_base = OTHER; note = 5'-methyl-deoxycytidine-3'-phosphorothioate
  modified_base 10: mod_base = OTHER; note = 5'-methyl-deoxycytidine-3'-phosphorothioate
  modified_base 11: mod_base = OTHER; note = 2'-deoxythymidine-3'-phosphorothioate
  modified_base 12: mod_base = OTHER; note = 2'-deoxythymidine-3'-phosphorothioate
  modified_base 13: mod_base = OTHER; note = 2'-deoxythymidine-3'-phosphorothioate
  modified_base 14: mod_base = OTHER; note = 2'-deoxyadenosine-3'-phosphorothioate
  modified_base 15: mod_base = OTHER; note = 2'-deoxyguanosine-3'-phosphorothioate
  modified_base 16: mod_base = OTHER; note = 2'-O-methyluridine-3'-phosphorothioate
  modified_base 17: mod_base = OTHER; note = 2'-O-methyladenosine-3'- phosphorothioate
  modified_base 18: mod_base = OTHER; note = 2'-O-methyluridine-3'-phosphorothioate
  modified_base 19: mod_base = OTHER; note = 2'-O-methylcytidine-3'- phosphorothioate
  modified_base 20: mod_base = OTHER; note = 2'-O-methyluridine-3'-phosphate
  misc_feature 1..5: note = RNA
  misc_feature 6..15: note = DNA
  misc_feature 16..20: note = RNA
gaattcttcctttagtatct

SEQ ID NO: 4248 - DNA, 20 bp, synthetic construct
  source 1..20: mol_type = other DNA
  modified_base 1: mod_base = OTHER; note = 2'-O-methylguanosine-3'- phosphorothioate
  modified_base 2: mod_base = OTHER; note = 2'-O-methylguanosine-3'- phosphorothioate
  modified_base 3: mod_base = OTHER; note = 2'-O-methylcytidine-3'- phosphorothioate
  modified_base 4: mod_base = OTHER; note = 2'-O-methylcytidine-3'- phosphorothioate
  modified_base 5: mod_base = OTHER; note = 2'-O-methyladenosine-3'- phosphorothioate
  modified_base 6: mod_base = OTHER; note = 2'-deoxyadenosine-3'-phosphorothioate
  modified_base 7: mod_base = OTHER; note = 5'-methyl-deoxycytidine-3'-phosphorothioate
  modified_base 8: mod_base = OTHER; note = 5'-methyl-deoxycytidine-3'-phosphorothioate
  modified_base 9: mod_base = OTHER; note = 2'-deoxyguanosine-3'-phosphorothioate
  modified_base 10: mod_base = OTHER; note = 2'-deoxyguanosine-3'-phosphorothioate
  modified_base 11: mod_base = OTHER; note = 2'-deoxyadenosine-3'-phosphorothioate
  modified_base 12: mod_base = OTHER; note = 2'-deoxyadenosine-3'-phosphorothioate
  modified_base 13: mod_base = OTHER; note = 2'-deoxythymidine-3'-phosphorothioate
  modified_base 14: mod_base = OTHER; note = 2'-deoxythymidine-3'-phosphorothioate
  modified_base 15: mod_base = OTHER; note = 5'-methyl-deoxycytidine-3'-phosphorothioate
  modified_base 16: mod_base = OTHER; note = 2'-O-methyluridine-3'-phosphorothioate
  modified_base 17: mod_base = OTHER; note = 2'-O-methyluridine-3'-phosphorothioate
  modified_base 18: mod_base = OTHER; note = 2'-O-methylcytidine-3'- phosphorothioate
  modified_base 19: mod_base = OTHER; note = 2'-O-methylcytidine-3'- phosphorothioate
  modified_base 20: mod_base = OTHER; note = 2'-O-methyluridine-3'-phosphate
  misc_feature 1..5: note = RNA
  misc_feature 6..15: note = DNA
  misc_feature 16..20: note = RNA
ggccaaccggaattcttcct

SEQ ID NO: 4249 - DNA, 20 bp, synthetic construct
  source 1..20: mol_type = other DNA
  modified_base 1: mod_base = OTHER; note = 2'-O-methylcytidine-3'- phosphorothioate
  modified_base 2: mod_base = OTHER; note = 2'-O-methyluridine-3'-phosphorothioate
  modified_base 3: mod_base = OTHER; note = 2'-O-methylcytidine-3'- phosphorothioate
  modified_base 4: mod_base = OTHER; note = 2'-O-methyladenosine-3'- phosphorothioate
  modified_base 5: mod_base = OTHER; note = 2'-O-methylguanosine-3'- phosphorothioate
  modified_base 6: mod_base = OTHER; note = 2'-deoxyadenosine-3'-phosphorothioate
  modified_base 7: mod_base = OTHER; note = 2'-deoxyguanosine-3'-phosphorothioate
  modified_base 8: mod_base = OTHER; note = 5'-methyl-deoxycytidine-3'-phosphorothioate
  modified_base 9: mod_base = OTHER; note = 5'-methyl-deoxycytidine-3'-phosphorothioate
  modified_base 10: mod_base = OTHER; note = 2'-deoxyadenosine-3'-phosphorothioate
  modified_base 11: mod_base = OTHER; note = 2'-deoxythymidine-3'-phosphorothioate
  modified_base 12: mod_base = OTHER; note = 2'-deoxyguanosine-3'-phosphorothioate
  modified_base 13: mod_base = OTHER; note = 2'-deoxyguanosine-3'-phosphorothioate
  modified_base 14: mod_base = OTHER; note = 5'-methyl-deoxycytidine-3'-phosphorothioate
  modified_base 15: mod_base = OTHER; note = 5'-methyl-deoxycytidine-3'-phosphorothioate
  modified_base 16: mod_base = OTHER; note = 2'-O-methyladenosine-3'- phosphorothioate
  modified_base 17: mod_base = OTHER; note = 2'-O-methyladenosine-3'- phosphorothioate
  modified_base 18: mod_base = OTHER; note = 2'-O-methylcytidine-3'- phosphorothioate
  modified_base 19: mod_base = OTHER; note = 2'-O-methylcytidine-3'- phosphorothioate
  modified_base 20: mod_base = OTHER; note = 2'-O-methylguanosine-3'-phosphate
  misc_feature 1..5: note = RNA
  misc_feature 6..15: note = DNA
  misc_feature 16..20: note = RNA
ctcagagccatggccaaccg

SEQ ID NO: 4250 - DNA, 20 bp, synthetic construct
  source 1..20: mol_type = other DNA
  modified_base 1: mod_base = OTHER; note = 2'-O-methyladenosine-3'- phosphorothioate
  modified_base 2: mod_base = OTHER; note = 2'-O-methyluridine-3'-phosphorothioate
  modified_base 3: mod_base = OTHER; note = 2'-O-methyluridine-3'-phosphorothioate
  modified_base 4: mod_base = OTHER; note = 2'-O-methylcytidine-3'- phosphorothioate
  modified_base 5: mod_base = OTHER; note = 2'-O-methyluridine-3'-phosphorothioate
  modified_base 6: mod_base = OTHER; note = 2'-deoxyguanosine-3'-phosphorothioate
  modified_base 7: mod_base = OTHER; note = 2'-deoxyguanosine-3'-phosphorothioate
  modified_base 8: mod_base = OTHER; note = 5'-methyl-deoxycytidine-3'-phosphorothioate
  modified_base 9: mod_base = OTHER; note = 2'-deoxyadenosine-3'-phosphorothioate
  modified_base 10: mod_base = OTHER; note = 5'-methyl-deoxycytidine-3'-phosphorothioate
  modified_base 11: mod_base = OTHER; note = 5'-methyl-deoxycytidine-3'-phosphorothioate
  modified_base 12: mod_base = OTHER; note = 5'-methyl-deoxycytidine-3'-phosphorothioate
  modified_base 13: mod_base = OTHER; note = 2'-deoxyadenosine-3'-phosphorothioate
  modified_base 14: mod_base = OTHER; note = 5'-methyl-deoxycytidine-3'-phosphorothioate
  modified_base 15: mod_base = OTHER; note = 2'-deoxythymidine-3'-phosphorothioate
  modified_base 16: mod_base = OTHER; note = 2'-O-methylcytidine-3'- phosphorothioate
  modified_base 17: mod_base = OTHER; note = 2'-O-methyladenosine-3'- phosphorothioate
  modified_base 18: mod_base = OTHER; note = 2'-O-methylguanosine-3'- phosphorothioate
  modified_base 19: mod_base = OTHER; note = 2'-O-methyladenosine-3'- phosphorothioate
  modified_base 20: mod_base = OTHER; note = 2'-O-methylguanosine-3'-phosphate
  misc_feature 1..5: note = RNA
  misc_feature 6..15: note = DNA
  misc_feature 16..20: note = RNA
attctggcacccactcagag

SEQ ID NO: 4251 - DNA, 20 bp, synthetic construct
  source 1..20: mol_type = other DNA
  modified_base 1: mod_base = OTHER; note = 2'-O-methyladenosine-3'- phosphorothioate
  modified_base 2: mod_base = OTHER; note = 2'-O-methyluridine-3'-phosphorothioate
  modified_base 3: mod_base = OTHER; note = 2'-O-methylguanosine-3'- phosphorothioate
  modified_base 4: mod_base = OTHER; note = 2'-O-methyladenosine-3'- phosphorothioate
  modified_base 5: mod_base = OTHER; note = 2'-O-methylcytidine-3'- phosphorothioate
  modified_base 6: mod_base = OTHER; note = 2'-deoxythymidine-3'-phosphorothioate
  modified_base 7: mod_base = OTHER; note = 2'-deoxythymidine-3'-phosphorothioate
  modified_base 8: mod_base = OTHER; note = 2'-deoxythymidine-3'-phosphorothioate
  modified_base 9: mod_base = OTHER; note = 5'-methyl-deoxycytidine-3'-phosphorothioate
  modified_base 10: mod_base = OTHER; note = 2'-deoxyadenosine-3'-phosphorothioate
  modified_base 11: mod_base = OTHER; note = 5'-methyl-deoxycytidine-3'-phosphorothioate
  modified_base 12: mod_base = OTHER; note = 2'-deoxyadenosine-3'-phosphorothioate
  modified_base 13: mod_base = OTHER; note = 2'-deoxythymidine-3'-phosphorothioate
  modified_base 14: mod_base = OTHER; note = 2'-deoxythymidine-3'-phosphorothioate
  modified_base 15: mod_base = OTHER; note = 5'-methyl-deoxycytidine-3'-phosphorothioate
  modified_base 16: mod_base = OTHER; note = 2'-O-methyluridine-3'-phosphorothioate
  modified_base 17: mod_base = OTHER; note = 2'-O-methylguanosine-3'- phosphorothioate
  modified_base 18: mod_base = OTHER; note = 2'-O-methylguanosine-3'- phosphorothioate
  modified_base 19: mod_base = OTHER; note = 2'-O-methylcytidine-3'- phosphorothioate
  modified_base 20: mod_base = OTHER; note = 2'-O-methyladenosine-3'-phosphate
  misc_feature 1..5: note = RNA
  misc_feature 6..15: note = DNA
  misc_feature 16..20: note = RNA
atgactttcacattctggca

SEQ ID NO: 4252 - DNA, 20 bp, synthetic construct
  source 1..20: mol_type = other DNA
  modified_base 1: mod_base = OTHER; note = 2'-O-methylguanosine-3'- phosphorothioate
  modified_base 2: mod_base = OTHER; note = 2'-O-methyluridine-3'-phosphorothioate
  modified_base 3: mod_base = OTHER; note = 2'-O-methylcytidine-3'- phosphorothioate
  modified_base 4: mod_base = OTHER; note = 2'-O-methyluridine-3'-phosphorothioate
  modified_base 5: mod_base = OTHER; note = 2'-O-methyluridine-3'-phosphorothioate
  modified_base 6: mod_base = OTHER; note = 2'-deoxyguanosine-3'-phosphorothioate
  modified_base 7: mod_base = OTHER; note = 2'-deoxythymidine-3'-phosphorothioate
  modified_base 8: mod_base = OTHER; note = 5'-methyl-deoxycytidine-3'-phosphorothioate
  modified_base 9: mod_base = OTHER; note = 2'-deoxyguanosine-3'-phosphorothioate
  modified_base 10: mod_base = OTHER; note = 2'-deoxyadenosine-3'-phosphorothioate
  modified_base 11: mod_base = OTHER; note = 2'-deoxythymidine-3'-phosphorothioate
  modified_base 12: mod_base = OTHER; note = 2'-deoxyguanosine-3'-phosphorothioate
  modified_base 13: mod_base = OTHER; note = 2'-deoxyadenosine-3'-phosphorothioate
  modified_base 14: mod_base = OTHER; note = 5'-methyl-deoxycytidine-3'-phosphorothioate
  modified_base 15: mod_base = OTHER; note = 2'-deoxythymidine-3'-phosphorothioate
  modified_base 16: mod_base = OTHER; note = 2'-O-methyluridine-3'-phosphorothioate
  modified_base 17: mod_base = OTHER; note = 2'-O-methyluridine-3'-phosphorothioate
  modified_base 18: mod_base = OTHER; note = 2'-O-methylcytidine-3'- phosphorothioate
  modified_base 19: mod_base = OTHER; note = 2'-O-methyladenosine-3'- phosphorothioate
  modified_base 20: mod_base = OTHER; note = 2'-O-methylcytidine-3'-phosphate
  misc_feature 1..5: note = RNA
  misc_feature 6..15: note = DNA
  misc_feature 16..20: note = RNA
gtcttgtcgatgactttcac

SEQ ID NO: 4253 - DNA, 20 bp, synthetic construct
  source 1..20: mol_type = other DNA
  modified_base 1: mod_base = OTHER; note = 2'-O-methyluridine-3'-phosphorothioate
  modified_base 2: mod_base = OTHER; note = 2'-O-methyluridine-3'-phosphorothioate
  modified_base 3: mod_base = OTHER; note = 2'-O-methyluridine-3'-phosphorothioate
  modified_base 4: mod_base = OTHER; note = 2'-O-methylcytidine-3'- phosphorothioate
  modified_base 5: mod_base = OTHER; note = 2'-O-methylcytidine-3'- phosphorothioate
  modified_base 6: mod_base = OTHER; note = 2'-deoxythymidine-3'-phosphorothioate
  modified_base 7: mod_base = OTHER; note = 5'-methyl-deoxycytidine-3'-phosphorothioate
  modified_base 8: mod_base = OTHER; note = 2'-deoxyadenosine-3'-phosphorothioate
  modified_base 9: mod_base = OTHER; note = 5'-methyl-deoxycytidine-3'-phosphorothioate
  modified_base 10: mod_base = OTHER; note = 5'-methyl-deoxycytidine-3'-phosphorothioate
  modified_base 11: mod_base = OTHER; note = 2'-deoxyadenosine-3'-phosphorothioate
  modified_base 12: mod_base = OTHER; note = 2'-deoxyadenosine-3'-phosphorothioate
  modified_base 13: mod_base = OTHER; note = 2'-deoxythymidine-3'-phosphorothioate
  modified_base 14: mod_base = OTHER; note = 2'-deoxyguanosine-3'-phosphorothioate
  modified_base 15: mod_base = OTHER; note = 2'-deoxythymidine-3'-phosphorothioate
  modified_base 16: mod_base = OTHER; note = 2'-O-methylcytidine-3'- phosphorothioate
  modified_base 17: mod_base = OTHER; note = 2'-O-methyluridine-3'-phosphorothioate
  modified_base 18: mod_base = OTHER; note = 2'-O-methyluridine-3'-phosphorothioate
  modified_base 19: mod_base = OTHER; note = 2'-O-methylguanosine-3'- phosphorothioate
  modified_base 20: mod_base = OTHER; note = 2'-O-methyluridine-3'-phosphate
  misc_feature 1..5: note = RNA
  misc_feature 6..15: note = DNA
  misc_feature 16..20: note = RNA
tttcctcaccaatgtcttgt

SEQ ID NO: 4254 - DNA, 20 bp, synthetic construct
  source 1..20: mol_type = other DNA
  modified_base 1: mod_base = OTHER; note = 2'-O-methylcytidine-3'- phosphorothioate
  modified_base 2: mod_base = OTHER; note = 2'-O-methyladenosine-3'- phosphorothioate
  modified_base 3: mod_base = OTHER; note = 2'-O-methyladenosine-3'- phosphorothioate
  modified_base 4: mod_base = OTHER; note = 2'-O-methyladenosine-3'- phosphorothioate
  modified_base 5: mod_base = OTHER; note = 2'-O-methylguanosine-3'- phosphorothioate
  modified_base 6: mod_base = OTHER; note = 2'-deoxyguanosine-3'-phosphorothioate
  modified_base 7: mod_base = OTHER; note = 2'-deoxyadenosine-3'-phosphorothioate
  modified_base 8: mod_base = OTHER; note = 2'-deoxythymidine-3'-phosphorothioate
  modified_base 9: mod_base = OTHER; note = 2'-deoxythymidine-3'-phosphorothioate
  modified_base 10: mod_base = OTHER; note = 2'-deoxythymidine-3'-phosphorothioate
  modified_base 11: mod_base = OTHER; note = 2'-deoxythymidine-3'-phosphorothioate
  modified_base 12: mod_base = OTHER; note = 2'-deoxythymidine-3'-phosphorothioate
  modified_base 13: mod_base = OTHER; note = 5'-methyl-deoxycytidine-3'-phosphorothioate
  modified_base 14: mod_base = OTHER; note = 5'-methyl-deoxycytidine-3'-phosphorothioate
  modified_base 15: mod_base = OTHER; note = 2'-deoxythymidine-3'-phosphorothioate
  modified_base 16: mod_base = OTHER; note = 2'-O-methylcytidine-3'- phosphorothioate
  modified_base 17: mod_base = OTHER; note = 2'-O-methyladenosine-3'- phosphorothioate
  modified_base 18: mod_base = OTHER; note = 2'-O-methylcytidine-3'- phosphorothioate
  modified_base 19: mod_base = OTHER; note = 2'-O-methylcytidine-3'- phosphorothioate
  modified_base 20: mod_base = OTHER; note = 2'-O-methyladenosine-3'-phosphate
  misc_feature 1..5: note = RNA
  misc_feature 6..15: note = DNA
  misc_feature 16..20: note = RNA
caaaggatttttcctcacca

SEQ ID NO: 4255 - DNA, 20 bp, synthetic construct
  source 1..20: mol_type = other DNA
  modified_base 1: mod_base = OTHER; note = 2'-O-methyluridine-3'-phosphorothioate
  modified_base 2: mod_base = OTHER; note = 2'-O-methyluridine-3'-phosphorothioate
  modified_base 3: mod_base = OTHER; note = 2'-O-methylguanosine-3'- phosphorothioate
  modified_base 4: mod_base = OTHER; note = 2'-O-methylguanosine-3'- phosphorothioate
  modified_base 5: mod_base = OTHER; note = 2'-O-methyladenosine-3'- phosphorothioate
  modified_base 6: mod_base = OTHER; note = 2'-deoxyadenosine-3'-phosphorothioate
  modified_base 7: mod_base = OTHER; note = 2'-deoxyadenosine-3'-phosphorothioate
  modified_base 8: mod_base = OTHER; note = 5'-methyl-deoxycytidine-3'-phosphorothioate
  modified_base 9: mod_base = OTHER; note = 2'-deoxyguanosine-3'-phosphorothioate
  modified_base 10: mod_base = OTHER; note = 2'-deoxyguanosine-3'-phosphorothioate
  modified_base 11: mod_base = OTHER; note = 5'-methyl-deoxycytidine-3'-phosphorothioate
  modified_base 12: mod_base = OTHER; note = 5'-methyl-deoxycytidine-3'-phosphorothioate
  modified_base 13: mod_base = OTHER; note = 2'-deoxyadenosine-3'-phosphorothioate
  modified_base 14: mod_base = OTHER; note = 2'-deoxyadenosine-3'-phosphorothioate
  modified_base 15: mod_base = OTHER; note = 2'-deoxyadenosine-3'-phosphorothioate
  modified_base 16: mod_base = OTHER; note = 2'-O-methylguanosine-3'- phosphorothioate
  modified_base 17: mod_base = OTHER; note = 2'-O-methylguanosine-3'- phosphorothioate
  modified_base 18: mod_base = OTHER; note = 2'-O-methyladenosine-3'- phosphorothioate
  modified_base 19: mod_base = OTHER; note = 2'-O-methyluridine-3'-phosphorothioate
  modified_base 20: mod_base = OTHER; note = 2'-O-methyluridine-3'-phosphate
  misc_feature 1..5: note = RNA
  misc_feature 6..15: note = DNA
  misc_feature 16..20: note = RNA
ttggaaacggccaaaggatt

SEQ ID NO: 4256 - DNA, 20 bp, synthetic construct
  source 1..20: mol_type = other DNA
  modified_base 1: mod_base = OTHER; note = 2'-O-methylguanosine-3'- phosphorothioate
  modified_base 2: mod_base = OTHER; note = 2'-O-methylcytidine-3'- phosphorothioate
  modified_base 3: mod_base = OTHER; note = 2'-O-methyladenosine-3'- phosphorothioate
  modified_base 4: mod_base = OTHER; note = 2'-O-methylcytidine-3'- phosphorothioate
  modified_base 5: mod_base = OTHER; note = 2'-O-methyluridine-3'-phosphorothioate
  modified_base 6: mod_base = OTHER; note = 2'-deoxyguanosine-3'-phosphorothioate
  modified_base 7: mod_base = OTHER; note = 2'-deoxythymidine-3'-phosphorothioate
  modified_base 8: mod_base = OTHER; note = 5'-methyl-deoxycytidine-3'-phosphorothioate
  modified_base 9: mod_base = OTHER; note = 2'-deoxyadenosine-3'-phosphorothioate
  modified_base 10: mod_base = OTHER; note = 2'-deoxyguanosine-3'-phosphorothioate
  modified_base 11: mod_base = OTHER; note = 2'-deoxyadenosine-3'-phosphorothioate
  modified_base 12: mod_base = OTHER; note = 2'-deoxythymidine-3'-phosphorothioate
  modified_base 13: mod_base = OTHER; note = 5'-methyl-deoxycytidine-3'-phosphorothioate
  modified_base 14: mod_base = OTHER; note = 2'-deoxythymidine-3'-phosphorothioate
  modified_base 15: mod_base = OTHER; note = 2'-deoxythymidine-3'-phosphorothioate
  modified_base 16: mod_base = OTHER; note = 2'-O-methylguanosine-3'- phosphorothioate
  modified_base 17: mod_base = OTHER; note = 2'-O-methylguanosine-3'- phosphorothioate
  modified_base 18: mod_base = OTHER; note = 2'-O-methyladenosine-3'- phosphorothioate
  modified_base 19: mod_base = OTHER; note = 2'-O-methyladenosine-3'- phosphorothioate
  modified_base 20: mod_base = OTHER; note = 2'-O-methyladenosine-3'-phosphate
  misc_feature 1..5: note = RNA
  misc_feature 6..15: note = DNA
  misc_feature 16..20: note = RNA
gcactgtcagatcttggaaa

SEQ ID NO: 4257 - DNA, 20 bp, synthetic construct
  source 1..20: mol_type = other DNA
  modified_base 1: mod_base = OTHER; note = 2'-O-methyladenosine-3'- phosphorothioate
  modified_base 2: mod_base = OTHER; note = 2'-O-methyladenosine-3'- phosphorothioate
  modified_base 3: mod_base = OTHER; note = 2'-O-methyladenosine-3'- phosphorothioate
  modified_base 4: mod_base = OTHER; note = 2'-O-methyluridine-3'-phosphorothioate
  modified_base 5: mod_base = OTHER; note = 2'-O-methyladenosine-3'- phosphorothioate
  modified_base 6: mod_base = OTHER; note = 2'-deoxythymidine-3'-phosphorothioate
  modified_base 7: mod_base = OTHER; note = 2'-deoxythymidine-3'-phosphorothioate
  modified_base 8: mod_base = OTHER; note = 2'-deoxyguanosine-3'-phosphorothioate
  modified_base 9: mod_base = OTHER; note = 2'-deoxythymidine-3'-phosphorothioate
  modified_base 10: mod_base = OTHER; note = 2'-deoxyguanosine-3'-phosphorothioate
  modified_base 11: mod_base = OTHER; note = 5'-methyl-deoxycytidine-3'-phosphorothioate
  modified_base 12: mod_base = OTHER; note = 2'-deoxyadenosine-3'-phosphorothioate
  modified_base 13: mod_base = OTHER; note = 5'-methyl-deoxycytidine-3'-phosphorothioate
  modified_base 14: mod_base = OTHER; note = 2'-deoxythymidine-3'-phosphorothioate
  modified_base 15: mod_base = OTHER; note = 2'-deoxyguanosine-3'-phosphorothioate
  modified_base 16: mod_base = OTHER; note = 2'-O-methyluridine-3'-phosphorothioate
  modified_base 17: mod_base = OTHER; note = 2'-O-methylcytidine-3'- phosphorothioate
  modified_base 18: mod_base = OTHER; note = 2'-O-methyladenosine-3'- phosphorothioate
  modified_base 19: mod_base = OTHER; note = 2'-O-methylguanosine-3'- phosphorothioate
  modified_base 20: mod_base = OTHER; note = 2'-O-methyladenosine-3'-phosphate
  misc_feature 1..5: note = RNA
  misc_feature 6..15: note = DNA
  misc_feature 16..20: note = RNA
aaatattgtgcactgtcaga

SEQ ID NO: 4258 - DNA, 20 bp, synthetic construct
  source 1..20: mol_type = other DNA
  modified_base 1: mod_base = OTHER; note = 2'-O-methyluridine-3'-phosphorothioate
  modified_base 2: mod_base = OTHER; note = 2'-O-methyladenosine-3'- phosphorothioate
  modified_base 3: mod_base = OTHER; note = 2'-O-methylcytidine-3'- phosphorothioate
  modified_base 4: mod_base = OTHER; note = 2'-O-methyladenosine-3'- phosphorothioate
  modified_base 5: mod_base = OTHER; note = 2'-O-methylguanosine-3'- phosphorothioate
  modified_base 6: mod_base = OTHER; note = 2'-deoxyadenosine-3'-phosphorothioate
  modified_base 7: mod_base = OTHER; note = 2'-deoxythymidine-3'-phosphorothioate
  modified_base 8: mod_base = OTHER; note = 2'-deoxyguanosine-3'-phosphorothioate
  modified_base 9: mod_base = OTHER; note = 2'-deoxyguanosine-3'-phosphorothioate
  modified_base 10: mod_base = OTHER; note = 2'-deoxyguanosine-3'-phosphorothioate
  modified_base 11: mod_base = OTHER; note = 2'-deoxyadenosine-3'-phosphorothioate
  modified_base 12: mod_base = OTHER; note = 2'-deoxyadenosine-3'-phosphorothioate
  modified_base 13: mod_base = OTHER; note = 2'-deoxyadenosine-3'-phosphorothioate
  modified_base 14: mod_base = OTHER; note = 2'-deoxyadenosine-3'-phosphorothioate
  modified_base 15: mod_base = OTHER; note = 2'-deoxythymidine-3'-phosphorothioate
  modified_base 16: mod_base = OTHER; note = 2'-O-methyladenosine-3'- phosphorothioate
  modified_base 17: mod_base = OTHER; note = 2'-O-methyluridine-3'-phosphorothioate
  modified_base 18: mod_base = OTHER; note = 2'-O-methyluridine-3'-phosphorothioate
  modified_base 19: mod_base = OTHER; note = 2'-O-methylguanosine-3'- phosphorothioate
  modified_base 20: mod_base = OTHER; note = 2'-O-methyluridine-3'-phosphate
  misc_feature 1..5: note = RNA
  misc_feature 6..15: note = DNA
  misc_feature 16..20: note = RNA
tacagatgggaaaatattgt

SEQ ID NO: 4259 - DNA, 20 bp, synthetic construct
  source 1..20: mol_type = other DNA
  modified_base 1: mod_base = OTHER; note = 2'-O-methyluridine-3'-phosphorothioate
  modified_base 2: mod_base = OTHER; note = 2'-O-methylguanosine-3'- phosphorothioate
  modified_base 3: mod_base = OTHER; note = 2'-O-methyladenosine-3'- phosphorothioate
  modified_base 4: mod_base = OTHER; note = 2'-O-methyladenosine-3'- phosphorothioate
  modified_base 5: mod_base = OTHER; note = 2'-O-methyladenosine-3'- phosphorothioate
  modified_base 6: mod_base = OTHER; note = 2'-deoxyadenosine-3'-phosphorothioate
  modified_base 7: mod_base = OTHER; note = 2'-deoxyadenosine-3'-phosphorothioate
  modified_base 8: mod_base = OTHER; note = 2'-deoxyadenosine-3'-phosphorothioate
  modified_base 9: mod_base = OTHER; note = 2'-deoxyadenosine-3'-phosphorothioate
  modified_base 10: mod_base = OTHER; note = 2'-deoxyadenosine-3'-phosphorothioate
  modified_base 11: mod_base = OTHER; note = 2'-deoxythymidine-3'-phosphorothioate
  modified_base 12: mod_base = OTHER; note = 2'-deoxyadenosine-3'-phosphorothioate
  modified_base 13: mod_base = OTHER; note = 2'-deoxyadenosine-3'-phosphorothioate
  modified_base 14: mod_base = OTHER; note = 2'-deoxythymidine-3'-phosphorothioate
  modified_base 15: mod_base = OTHER; note = 2'-deoxyadenosine-3'-phosphorothioate
  modified_base 16: mod_base = OTHER; note = 2'-O-methylcytidine-3'- phosphorothioate
  modified_base 17: mod_base = OTHER; note = 2'-O-methyladenosine-3'- phosphorothioate
  modified_base 18: mod_base = OTHER; note = 2'-O-methylguanosine-3'- phosphorothioate
  modified_base 19: mod_base = OTHER; note = 2'-O-methyladenosine-3'- phosphorothioate
  modified_base 20: mod_base = OTHER; note = 2'-O-methyluridine-3'-phosphate
  misc_feature 1..5: note = RNA
  misc_feature 6..15: note = DNA
  misc_feature 16..20: note = RNA
tgaaaaaaaataatacagat

SEQ ID NO: 4260 - DNA, 20 bp, synthetic construct
  source 1..20: mol_type = other DNA
  modified_base 1: mod_base = OTHER; note = 2'-O-methyluridine-3'-phosphorothioate
  modified_base 2: mod_base = OTHER; note = 2'-O-methyladenosine-3'- phosphorothioate
  modified_base 3: mod_base = OTHER; note = 2'-O-methyladenosine-3'- phosphorothioate
  modified_base 4: mod_base = OTHER; note = 2'-O-methyluridine-3'-phosphorothioate
  modified_base 5: mod_base = OTHER; note = 2'-O-methyladenosine-3'- phosphorothioate
  modified_base 6: mod_base = OTHER; note = 5'-methyl-deoxycytidine-3'-phosphorothioate
  modified_base 7: mod_base = OTHER; note = 2'-deoxyadenosine-3'-phosphorothioate
  modified_base 8: mod_base = OTHER; note = 2'-deoxythymidine-3'-phosphorothioate
  modified_base 9: mod_base = OTHER; note = 2'-deoxyguanosine-3'-phosphorothioate
  modified_base 10: mod_base = OTHER; note = 5'-methyl-deoxycytidine-3'-phosphorothioate
  modified_base 11: mod_base = OTHER; note = 2'-deoxythymidine-3'-phosphorothioate
  modified_base 12: mod_base = OTHER; note = 2'-deoxyguanosine-3'-phosphorothioate
  modified_base 13: mod_base = OTHER; note = 2'-deoxyadenosine-3'-phosphorothioate
  modified_base 14: mod_base = OTHER; note = 2'-deoxyadenosine-3'-phosphorothioate
  modified_base 15: mod_base = OTHER; note = 2'-deoxyadenosine-3'-phosphorothioate
  modified_base 16: mod_base = OTHER; note = 2'-O-methyladenosine-3'- phosphorothioate
  modified_base 17: mod_base = OTHER; note = 2'-O-methyladenosine-3'- phosphorothioate
  modified_base 18: mod_base = OTHER; note = 2'-O-methyladenosine-3'- phosphorothioate
  modified_base 19: mod_base = OTHER; note = 2'-O-methyladenosine-3'- phosphorothioate
  modified_base 20: mod_base = OTHER; note = 2'-O-methyladenosine-3'-phosphate
  misc_feature 1..5: note = RNA
  misc_feature 6..15: note = DNA
  misc_feature 16..20: note = RNA
taatacatgctgaaaaaaaa

SEQ ID NO: 4261 - DNA, 20 bp, synthetic construct
  source 1..20: mol_type = other DNA
  modified_base 1: mod_base = OTHER; note = 2'-O-methylcytidine-3'- phosphorothioate
  modified_base 2: mod_base = OTHER; note = 2'-O-methyluridine-3'-phosphorothioate
  modified_base 3: mod_base = OTHER; note = 2'-O-methylcytidine-3'- phosphorothioate
  modified_base 4: mod_base = OTHER; note = 2'-O-methyluridine-3'-phosphorothioate
  modified_base 5: mod_base = OTHER; note = 2'-O-methyluridine-3'-phosphorothioate
  modified_base 6: mod_base = OTHER; note = 2'-deoxythymidine-3'-phosphorothioate
  modified_base 7: mod_base = OTHER; note = 2'-deoxyguanosine-3'-phosphorothioate
  modified_base 8: mod_base = OTHER; note = 2'-deoxythymidine-3'-phosphorothioate
  modified_base 9: mod_base = OTHER; note = 5'-methyl-deoxycytidine-3'-phosphorothioate
  modified_base 10: mod_base = OTHER; note = 2'-deoxyadenosine-3'-phosphorothioate
  modified_base 11: mod_base = OTHER; note = 2'-deoxyadenosine-3'-phosphorothioate
  modified_base 12: mod_base = OTHER; note = 2'-deoxyguanosine-3'-phosphorothioate
  modified_base 13: mod_base = OTHER; note = 2'-deoxythymidine-3'-phosphorothioate
  modified_base 14: mod_base = OTHER; note = 2'-deoxyadenosine-3'-phosphorothioate
  modified_base 15: mod_base = OTHER; note = 2'-deoxyadenosine-3'-phosphorothioate
  modified_base 16: mod_base = OTHER; note = 2'-O-methyluridine-3'-phosphorothioate
  modified_base 17: mod_base = OTHER; note = 2'-O-methyladenosine-3'- phosphorothioate
  modified_base 18: mod_base = OTHER; note = 2'-O-methylcytidine-3'- phosphorothioate
  modified_base 19: mod_base = OTHER; note = 2'-O-methyladenosine-3'- phosphorothioate
  modified_base 20: mod_base = OTHER; note = 2'-O-methyluridine-3'-phosphate
  misc_feature 1..5: note = RNA
  misc_feature 6..15: note = DNA
  misc_feature 16..20: note = RNA
ctctttgtcaagtaatacat

SEQ ID NO: 4262 - DNA, 20 bp, synthetic construct
  source 1..20: mol_type = other DNA
  modified_base 1: mod_base = OTHER; note = 2'-O-methylguanosine-3'- phosphorothioate
  modified_base 2: mod_base = OTHER; note = 2'-O-methylcytidine-3'- phosphorothioate
  modified_base 3: mod_base = OTHER; note = 2'-O-methyladenosine-3'- phosphorothioate
  modified_base 4: mod_base = OTHER; note = 2'-O-methylcytidine-3'- phosphorothioate
  modified_base 5: mod_base = OTHER; note = 2'-O-methyladenosine-3'- phosphorothioate
  modified_base 6: mod_base = OTHER; note = 2'-deoxyguanosine-3'-phosphorothioate
  modified_base 7: mod_base = OTHER; note = 2'-deoxythymidine-3'-phosphorothioate
  modified_base 8: mod_base = OTHER; note = 2'-deoxyguanosine-3'-phosphorothioate
  modified_base 9: mod_base = OTHER; note = 2'-deoxythymidine-3'-phosphorothioate
  modified_base 10: mod_base = OTHER; note = 5'-methyl-deoxycytidine-3'-phosphorothioate
  modified_base 11: mod_base = OTHER; note = 2'-deoxythymidine-3'-phosphorothioate
  modified_base 12: mod_base = OTHER; note = 5'-methyl-deoxycytidine-3'-phosphorothioate
  modified_base 13: mod_base = OTHER; note = 2'-deoxythymidine-3'-phosphorothioate
  modified_base 14: mod_base = OTHER; note = 2'-deoxythymidine-3'-phosphorothioate
  modified_base 15: mod_base = OTHER; note = 2'-deoxythymidine-3'-phosphorothioate
  modified_base 16: mod_base = OTHER; note = 2'-O-methylguanosine-3'- phosphorothioate
  modified_base 17: mod_base = OTHER; note = 2'-O-methyluridine-3'-phosphorothioate
  modified_base 18: mod_base = OTHER; note = 2'-O-methylcytidine-3'- phosphorothioate
  modified_base 19: mod_base = OTHER; note = 2'-O-methyladenosine-3'- phosphorothioate
  modified_base 20: mod_base = OTHER; note = 2'-O-methyladenosine-3'-phosphate
  misc_feature 1..5: note = RNA
  misc_feature 6..15: note = DNA
  misc_feature 16..20: note = RNA
gcacagtgtctctttgtcaa

SEQ ID NO: 4263 - DNA, 20 bp, synthetic construct
  source 1..20: mol_type = other DNA
  modified_base 1: mod_base = OTHER; note = 2'-O-methyluridine-3'-phosphorothioate
  modified_base 2: mod_base = OTHER; note = 2'-O-methylguanosine-3'- phosphorothioate
  modified_base 3: mod_base = OTHER; note = 2'-O-methylguanosine-3'- phosphorothioate
  modified_base 4: mod_base = OTHER; note = 2'-O-methyluridine-3'-phosphorothioate
  modified_base 5: mod_base = OTHER; note = 2'-O-methylcytidine-3'- phosphorothioate
  modified_base 6: mod_base = OTHER; note = 2'-deoxyadenosine-3'-phosphorothioate
  modified_base 7: mod_base = OTHER; note = 5'-methyl-deoxycytidine-3'-phosphorothioate
  modified_base 8: mod_base = OTHER; note = 5'-methyl-deoxycytidine-3'-phosphorothioate
  modified_base 9: mod_base = OTHER; note = 5'-methyl-deoxycytidine-3'-phosphorothioate
  modified_base 10: mod_base = OTHER; note = 2'-deoxythymidine-3'-phosphorothioate
  modified_base 11: mod_base = OTHER; note = 5'-methyl-deoxycytidine-3'-phosphorothioate
  modified_base 12: mod_base = OTHER; note = 2'-deoxythymidine-3'-phosphorothioate
  modified_base 13: mod_base = OTHER; note = 2'-deoxyguanosine-3'-phosphorothioate
  modified_base 14: mod_base = OTHER; note = 5'-methyl-deoxycytidine-3'-phosphorothioate
  modified_base 15: mod_base = OTHER; note = 2'-deoxyadenosine-3'-phosphorothioate
  modified_base 16: mod_base = OTHER; note = 2'-O-methylcytidine-3'- phosphorothioate
  modified_base 17: mod_base = OTHER; note = 2'-O-methyladenosine-3'- phosphorothioate
  modified_base 18: mod_base = OTHER; note = 2'-O-methylguanosine-3'- phosphorothioate
  modified_base 19: mod_base = OTHER; note = 2'-O-methyluridine-3'-phosphorothioate
  modified_base 20: mod_base = OTHER; note = 2'-O-methylguanosine-3'-phosphate
  misc_feature 1..5: note = RNA
  misc_feature 6..15: note = DNA
  misc_feature 16..20: note = RNA
tggtcaccctctgcacagtg

SEQ ID NO: 4264 - DNA, 20 bp, synthetic construct
  source 1..20: mol_type = other DNA
  modified_base 1: mod_base = OTHER; note = 2'-O-methyluridine-3'-phosphorothioate
  modified_base 2: mod_base = OTHER; note = 2'-O-methyluridine-3'-phosphorothioate
  modified_base 3: mod_base = OTHER; note = 2'-O-methyladenosine-3'- phosphorothioate
  modified_base 4: mod_base = OTHER; note = 2'-O-methylcytidine-3'- phosphorothioate
  modified_base 5: mod_base = OTHER; note = 2'-O-methyladenosine-3'- phosphorothioate
  modified_base 6: mod_base = OTHER; note = 2'-deoxyguanosine-3'-phosphorothioate
  modified_base 7: mod_base = OTHER; note = 2'-deoxyadenosine-3'-phosphorothioate
  modified_base 8: mod_base = OTHER; note = 5'-methyl-deoxycytidine-3'-phosphorothioate
  modified_base 9: mod_base = OTHER; note = 2'-deoxythymidine-3'-phosphorothioate
  modified_base 10: mod_base = OTHER; note = 2'-deoxyguanosine-3'-phosphorothioate
  modified_base 11: mod_base = OTHER; note = 2'-deoxythymidine-3'-phosphorothioate
  modified_base 12: mod_base = OTHER; note = 2'-deoxyguanosine-3'-phosphorothioate
  modified_base 13: mod_base = OTHER; note = 2'-deoxyguanosine-3'-phosphorothioate
  modified_base 14: mod_base = OTHER; note = 2'-deoxythymidine-3'-phosphorothioate
  modified_base 15: mod_base = OTHER; note = 5'-methyl-deoxycytidine-3'-phosphorothioate
  modified_base 16: mod_base = OTHER; note = 2'-O-methyladenosine-3'- phosphorothioate
  modified_base 17: mod_base = OTHER; note = 2'-O-methylcytidine-3'- phosphorothioate
  modified_base 18: mod_base = OTHER; note = 2'-O-methylcytidine-3'- phosphorothioate
  modified_base 19: mod_base = OTHER; note = 2'-O-methylcytidine-3'- phosphorothioate
  modified_base 20: mod_base = OTHER; note = 2'-O-methyluridine-3'-phosphate
  misc_feature 1..5: note = RNA
  misc_feature 6..15: note = DNA
  misc_feature 16..20: note = RNA
ttacagactgtggtcaccct

SEQ ID NO: 4265 - DNA, 20 bp, synthetic construct
  source 1..20: mol_type = other DNA
  modified_base 1: mod_base = OTHER; note = 2'-O-methyluridine-3'-phosphorothioate
  modified_base 2: mod_base = OTHER; note = 2'-O-methyluridine-3'-phosphorothioate
  modified_base 3: mod_base = OTHER; note = 2'-O-methylguanosine-3'- phosphorothioate
  modified_base 4: mod_base = OTHER; note = 2'-O-methyladenosine-3'- phosphorothioate
  modified_base 5: mod_base = OTHER; note = 2'-O-methyladenosine-3'- phosphorothioate
  modified_base 6: mod_base = OTHER; note = 2'-deoxyguanosine-3'-phosphorothioate
  modified_base 7: mod_base = OTHER; note = 2'-deoxythymidine-3'-phosphorothioate
  modified_base 8: mod_base = OTHER; note = 2'-deoxyguanosine-3'-phosphorothioate
  modified_base 9: mod_base = OTHER; note = 2'-deoxyguanosine-3'-phosphorothioate
  modified_base 10: mod_base = OTHER; note = 2'-deoxyguanosine-3'-phosphorothioate
  modified_base 11: mod_base = OTHER; note = 2'-deoxyguanosine-3'-phosphorothioate
  modified_base 12: mod_base = OTHER; note = 2'-deoxyadenosine-3'-phosphorothioate
  modified_base 13: mod_base = OTHER; note = 2'-deoxyadenosine-3'-phosphorothioate
  modified_base 14: mod_base = OTHER; note = 2'-deoxythymidine-3'-phosphorothioate
  modified_base 15: mod_base = OTHER; note = 2'-deoxythymidine-3'-phosphorothioate
  modified_base 16: mod_base = OTHER; note = 2'-O-methyladenosine-3'- phosphorothioate
  modified_base 17: mod_base = OTHER; note = 2'-O-methylcytidine-3'- phosphorothioate
  modified_base 18: mod_base = OTHER; note = 2'-O-methyladenosine-3'- phosphorothioate
  modified_base 19: mod_base = OTHER; note = 2'-O-methylguanosine-3'- phosphorothioate
  modified_base 20: mod_base = OTHER; note = 2'-O-methyladenosine-3'-phosphate
  misc_feature 1..5: note = RNA
  misc_feature 6..15: note = DNA
  misc_feature 16..20: note = RNA
ttgaagtggggaattacaga

SEQ ID NO: 4266 - DNA, 20 bp, synthetic construct
  source 1..20: mol_type = other DNA
  modified_base 1: mod_base = OTHER; note = 2'-O-methylcytidine-3'- phosphorothioate
  modified_base 2: mod_base = OTHER; note = 2'-O-methylcytidine-3'- phosphorothioate
  modified_base 3: mod_base = OTHER; note = 2'-O-methylcytidine-3'- phosphorothioate
  modified_base 4: mod_base = OTHER; note = 2'-O-methyluridine-3'-phosphorothioate
  modified_base 5: mod_base = OTHER; note = 2'-O-methyluridine-3'-phosphorothioate
  modified_base 6: mod_base = OTHER; note = 2'-deoxythymidine-3'-phosphorothioate
  modified_base 7: mod_base = OTHER; note = 2'-deoxyguanosine-3'-phosphorothioate
  modified_base 8: mod_base = OTHER; note = 2'-deoxythymidine-3'-phosphorothioate
  modified_base 9: mod_base = OTHER; note = 2'-deoxyadenosine-3'-phosphorothioate
  modified_base 10: mod_base = OTHER; note = 2'-deoxythymidine-3'-phosphorothioate
  modified_base 11: mod_base = OTHER; note = 2'-deoxythymidine-3'-phosphorothioate
  modified_base 12: mod_base = OTHER; note = 2'-deoxyguanosine-3'-phosphorothioate
  modified_base 13: mod_base = OTHER; note = 2'-deoxyadenosine-3'-phosphorothioate
  modified_base 14: mod_base = OTHER; note = 2'-deoxyadenosine-3'-phosphorothioate
  modified_base 15: mod_base = OTHER; note = 2'-deoxyguanosine-3'-phosphorothioate
  modified_base 16: mod_base = OTHER; note = 2'-O-methyluridine-3'-phosphorothioate
  modified_base 17: mod_base = OTHER; note = 2'-O-methylguanosine-3'- phosphorothioate
  modified_base 18: mod_base = OTHER; note = 2'-O-methylguanosine-3'- phosphorothioate
  modified_base 19: mod_base = OTHER; note = 2'-O-methylguanosine-3'- phosphorothioate
  modified_base 20: mod_base = OTHER; note = 2'-O-methylguanosine-3'-phosphate
  misc_feature 1..5: note = RNA
  misc_feature 6..15: note = DNA
  misc_feature 16..20: note = RNA
ccctttgtattgaagtgggg

SEQ ID NO: 4267 - DNA, 20 bp, synthetic construct
  source 1..20: mol_type = other DNA
  modified_base 1: mod_base = OTHER; note = 2'-O-methyladenosine-3'- phosphorothioate
  modified_base 2: mod_base = OTHER; note = 2'-O-methyladenosine-3'- phosphorothioate
  modified_base 3: mod_base = OTHER; note = 2'-O-methyladenosine-3'- phosphorothioate
  modified_base 4: mod_base = OTHER; note = 2'-O-methylguanosine-3'- phosphorothioate
  modified_base 5: mod_base = OTHER; note = 2'-O-methyladenosine-3'- phosphorothioate
  modified_base 6: mod_base = OTHER; note = 2'-deoxyadenosine-3'-phosphorothioate
  modified_base 7: mod_base = OTHER; note = 5'-methyl-deoxycytidine-3'-phosphorothioate
  modified_base 8: mod_base = OTHER; note = 2'-deoxyguanosine-3'-phosphorothioate
  modified_base 9: mod_base = OTHER; note = 2'-deoxyadenosine-3'-phosphorothioate
  modified_base 10: mod_base = OTHER; note = 5'-methyl-deoxycytidine-3'-phosphorothioate
  modified_base 11: mod_base = OTHER; note = 2'-deoxyadenosine-3'-phosphorothioate
  modified_base 12: mod_base = OTHER; note = 5'-methyl-deoxycytidine-3'-phosphorothioate
  modified_base 13: mod_base = OTHER; note = 5'-methyl-deoxycytidine-3'-phosphorothioate
  modified_base 14: mod_base = OTHER; note = 5'-methyl-deoxycytidine-3'-phosphorothioate
  modified_base 15: mod_base = OTHER; note = 2'-deoxythymidine-3'-phosphorothioate
  modified_base 16: mod_base = OTHER; note = 2'-O-methyluridine-3'-phosphorothioate
  modified_base 17: mod_base = OTHER; note = 2'-O-methyluridine-3'-phosphorothioate
  modified_base 18: mod_base = OTHER; note = 2'-O-methylguanosine-3'- phosphorothioate
  modified_base 19: mod_base = OTHER; note = 2'-O-methyluridine-3'-phosphorothioate
  modified_base 20: mod_base = OTHER; note = 2'-O-methyladenosine-3'-phosphate
  misc_feature 1..5: note = RNA
  misc_feature 6..15: note = DNA
  misc_feature 16..20: note = RNA
aaagaacgacaccctttgta

SEQ ID NO: 4268 - DNA, 20 bp, synthetic construct
  source 1..20: mol_type = other DNA
  modified_base 1: mod_base = OTHER; note = 2'-O-methyluridine-3'-phosphorothioate
  modified_base 2: mod_base = OTHER; note = 2'-O-methyladenosine-3'- phosphorothioate
  modified_base 3: mod_base = OTHER; note = 2'-O-methyluridine-3'-phosphorothioate
  modified_base 4: mod_base = OTHER; note = 2'-O-methyluridine-3'-phosphorothioate
  modified_base 5: mod_base = OTHER; note = 2'-O-methyluridine-3'-phosphorothioate
  modified_base 6: mod_base = OTHER; note = 2'-deoxythymidine-3'-phosphorothioate
  modified_base 7: mod_base = OTHER; note = 2'-deoxyguanosine-3'-phosphorothioate
  modified_base 8: mod_base = OTHER; note = 2'-deoxythymidine-3'-phosphorothioate
  modified_base 9: mod_base = OTHER; note = 2'-deoxythymidine-3'-phosphorothioate
  modified_base 10: mod_base = OTHER; note = 2'-deoxyguanosine-3'-phosphorothioate
  modified_base 11: mod_base = OTHER; note = 2'-deoxyguanosine-3'-phosphorothioate
  modified_base 12: mod_base = OTHER; note = 2'-deoxyadenosine-3'-phosphorothioate
  modified_base 13: mod_base = OTHER; note = 2'-deoxyadenosine-3'-phosphorothioate
  modified_base 14: mod_base = OTHER; note = 2'-deoxyadenosine-3'-phosphorothioate
  modified_base 15: mod_base = OTHER; note = 2'-deoxyadenosine-3'-phosphorothioate
  modified_base 16: mod_base = OTHER; note = 2'-O-methylguanosine-3'- phosphorothioate
  modified_base 17: mod_base = OTHER; note = 2'-O-methyladenosine-3'- phosphorothioate
  modified_base 18: mod_base = OTHER; note = 2'-O-methyladenosine-3'- phosphorothioate
  modified_base 19: mod_base = OTHER; note = 2'-O-methylcytidine-3'- phosphorothioate
  modified_base 20: mod_base = OTHER; note = 2'-O-methylguanosine-3'-phosphate
  misc_feature 1..5: note = RNA
  misc_feature 6..15: note = DNA
  misc_feature 16..20: note = RNA
tattttgttggaaaagaacg

SEQ ID NO: 4269 - DNA, 20 bp, synthetic construct
  source 1..20: mol_type = other DNA
  modified_base 1: mod_base = OTHER; note = 2'-O-methyladenosine-3'- phosphorothioate
  modified_base 2: mod_base = OTHER; note = 2'-O-methyladenosine-3'- phosphorothioate
  modified_base 3: mod_base = OTHER; note = 2'-O-methylguanosine-3'- phosphorothioate
  modified_base 4: mod_base = OTHER; note = 2'-O-methylguanosine-3'- phosphorothioate
  modified_base 5: mod_base = OTHER; note = 2'-O-methylguanosine-3'- phosphorothioate
  modified_base 6: mod_base = OTHER; note = 2'-deoxyadenosine-3'-phosphorothioate
  modified_base 7: mod_base = OTHER; note = 2'-deoxythymidine-3'-phosphorothioate
  modified_base 8: mod_base = OTHER; note = 2'-deoxythymidine-3'-phosphorothioate
  modified_base 9: mod_base = OTHER; note = 2'-deoxyguanosine-3'-phosphorothioate
  modified_base 10: mod_base = OTHER; note = 5'-methyl-deoxycytidine-3'-phosphorothioate
  modified_base 11: mod_base = OTHER; note = 2'-deoxythymidine-3'-phosphorothioate
  modified_base 12: mod_base = OTHER; note = 2'-deoxyadenosine-3'-phosphorothioate
  modified_base 13: mod_base = OTHER; note = 2'-deoxythymidine-3'-phosphorothioate
  modified_base 14: mod_base = OTHER; note = 2'-deoxythymidine-3'-phosphorothioate
  modified_base 15: mod_base = OTHER; note = 2'-deoxythymidine-3'-phosphorothioate
  modified_base 16: mod_base = OTHER; note = 2'-O-methyluridine-3'-phosphorothioate
  modified_base 17: mod_base = OTHER; note = 2'-O-methylguanosine-3'- phosphorothioate
  modified_base 18: mod_base = OTHER; note = 2'-O-methyluridine-3'-phosphorothioate
  modified_base 19: mod_base = OTHER; note = 2'-O-methyluridine-3'-phosphorothioate
  modified_base 20: mod_base = OTHER; note = 2'-O-methylguanosine-3'-phosphate
  misc_feature 1..5: note = RNA
  misc_feature 6..15: note = DNA
  misc_feature 16..20: note = RNA
aagggattgctattttgttg

SEQ ID NO: 4270 - DNA, 20 bp, synthetic construct
  source 1..20: mol_type = other DNA
  modified_base 1: mod_base = OTHER; note = 2'-O-methylguanosine-3'- phosphorothioate
  modified_base 2: mod_base = OTHER; note = 2'-O-methylcytidine-3'- phosphorothioate
  modified_base 3: mod_base = OTHER; note = 2'-O-methyladenosine-3'- phosphorothioate
  modified_base 4: mod_base = OTHER; note = 2'-O-methyladenosine-3'- phosphorothioate
  modified_base 5: mod_base = OTHER; note = 2'-O-methyluridine-3'-phosphorothioate
  modified_base 6: mod_base = OTHER; note = 2'-deoxyguanosine-3'-phosphorothioate
  modified_base 7: mod_base = OTHER; note = 2'-deoxyadenosine-3'-phosphorothioate
  modified_base 8: mod_base = OTHER; note = 2'-deoxyadenosine-3'-phosphorothioate
  modified_base 9: mod_base = OTHER; note = 2'-deoxyadenosine-3'-phosphorothioate
  modified_base 10: mod_base = OTHER; note = 2'-deoxythymidine-3'-phosphorothioate
  modified_base 11: mod_base = OTHER; note = 2'-deoxyadenosine-3'-phosphorothioate
  modified_base 12: mod_base = OTHER; note = 2'-deoxyadenosine-3'-phosphorothioate
  modified_base 13: mod_base = OTHER; note = 2'-deoxyadenosine-3'-phosphorothioate
  modified_base 14: mod_base = OTHER; note = 2'-deoxyadenosine-3'-phosphorothioate
  modified_base 15: mod_base = OTHER; note = 2'-deoxyguanosine-3'-phosphorothioate
  modified_base 16: mod_base = OTHER; note = 2'-O-methylguanosine-3'- phosphorothioate
  modified_base 17: mod_base = OTHER; note = 2'-O-methylguanosine-3'- phosphorothioate
  modified_base 18: mod_base = OTHER; note = 2'-O-methyladenosine-3'- phosphorothioate
  modified_base 19: mod_base = OTHER; note = 2'-O-methyluridine-3'-phosphorothioate
  modified_base 20: mod_base = OTHER; note = 2'-O-methyluridine-3'-phosphate
  misc_feature 1..5: note = RNA
  misc_feature 6..15: note = DNA
  misc_feature 16..20: note = RNA
gcaatgaaataaaagggatt

SEQ ID NO: 4271 - DNA, 20 bp, synthetic construct
  source 1..20: mol_type = other DNA
  modified_base 1: mod_base = OTHER; note = 2'-O-methyladenosine-3'- phosphorothioate
  modified_base 2: mod_base = OTHER; note = 2'-O-methyladenosine-3'- phosphorothioate
  modified_base 3: mod_base = OTHER; note = 2'-O-methyladenosine-3'- phosphorothioate
  modified_base 4: mod_base = OTHER; note = 2'-O-methyladenosine-3'- phosphorothioate
  modified_base 5: mod_base = OTHER; note = 2'-O-methylguanosine-3'- phosphorothioate
  modified_base 6: mod_base = OTHER; note = 2'-deoxythymidine-3'-phosphorothioate
  modified_base 7: mod_base = OTHER; note = 5'-methyl-deoxycytidine-3'-phosphorothioate
  modified_base 8: mod_base = OTHER; note = 2'-deoxyadenosine-3'-phosphorothioate
  modified_base 9: mod_base = OTHER; note = 2'-deoxyadenosine-3'-phosphorothioate
  modified_base 10: mod_base = OTHER; note = 2'-deoxyadenosine-3'-phosphorothioate
  modified_base 11: mod_base = OTHER; note = 2'-deoxyadenosine-3'-phosphorothioate
  modified_base 12: mod_base = OTHER; note = 2'-deoxyguanosine-3'-phosphorothioate
  modified_base 13: mod_base = OTHER; note = 5'-methyl-deoxycytidine-3'-phosphorothioate
  modified_base 14: mod_base = OTHER; note = 2'-deoxyadenosine-3'-phosphorothioate
  modified_base 15: mod_base = OTHER; note = 2'-deoxyadenosine-3'-phosphorothioate
  modified_base 16: mod_base = OTHER; note = 2'-O-methyluridine-3'-phosphorothioate
  modified_base 17: mod_base = OTHER; note = 2'-O-methylguanosine-3'- phosphorothioate
  modified_base 18: mod_base = OTHER; note = 2'-O-methyladenosine-3'- phosphorothioate
  modified_base 19: mod_base = OTHER; note = 2'-O-methyladenosine-3'- phosphorothioate
  modified_base 20: mod_base = OTHER; note = 2'-O-methyladenosine-3'-phosphate
  misc_feature 1..5: note = RNA
  misc_feature 6..15: note = DNA
  misc_feature 16..20: note = RNA
aaaagtcaaaagcaatgaaa

SEQ ID NO: 4272 - DNA, 20 bp, synthetic construct
  source 1..20: mol_type = other DNA
  modified_base 1: mod_base = OTHER; note = 2'-O-methylguanosine-3'- phosphorothioate
  modified_base 2: mod_base = OTHER; note = 2'-O-methyladenosine-3'- phosphorothioate
  modified_base 3: mod_base = OTHER; note = 2'-O-methylcytidine-3'- phosphorothioate
  modified_base 4: mod_base = OTHER; note = 2'-O-methyladenosine-3'- phosphorothioate
  modified_base 5: mod_base = OTHER; note = 2'-O-methylcytidine-3'- phosphorothioate
  modified_base 6: mod_base = OTHER; note = 5'-methyl-deoxycytidine-3'-phosphorothioate
  modified_base 7: mod_base = OTHER; note = 5'-methyl-deoxycytidine-3'-phosphorothioate
  modified_base 8: mod_base = OTHER; note = 2'-deoxyadenosine-3'-phosphorothioate
  modified_base 9: mod_base = OTHER; note = 2'-deoxythymidine-3'-phosphorothioate
  modified_base 10: mod_base = OTHER; note = 2'-deoxythymidine-3'-phosphorothioate
  modified_base 11: mod_base = OTHER; note = 2'-deoxyguanosine-3'-phosphorothioate
  modified_base 12: mod_base = OTHER; note = 2'-deoxyadenosine-3'-phosphorothioate
  modified_base 13: mod_base = OTHER; note = 2'-deoxyadenosine-3'-phosphorothioate
  modified_base 14: mod_base = OTHER; note = 2'-deoxyadenosine-3'-phosphorothioate
  modified_base 15: mod_base = OTHER; note = 2'-deoxyadenosine-3'-phosphorothioate
  modified_base 16: mod_base = OTHER; note = 2'-O-methylguanosine-3'- phosphorothioate
  modified_base 17: mod_base = OTHER; note = 2'-O-methyluridine-3'-phosphorothioate
  modified_base 18: mod_base = OTHER; note = 2'-O-methylcytidine-3'- phosphorothioate
  modified_base 19: mod_base = OTHER; note = 2'-O-methyladenosine-3'- phosphorothioate
  modified_base 20: mod_base = OTHER; note = 2'-O-methyladenosine-3'-phosphate
  misc_feature 1..5: note = RNA
  misc_feature 6..15: note = DNA
  misc_feature 16..20: note = RNA
gacacccattgaaaagtcaa

SEQ ID NO: 4273 - DNA, 20 bp, synthetic construct
  source 1..20: mol_type = other DNA
  modified_base 1: mod_base = OTHER; note = 2'-O-methyladenosine-3'- phosphorothioate
  modified_base 2: mod_base = OTHER; note = 2'-O-methyladenosine-3'- phosphorothioate
  modified_base 3: mod_base = OTHER; note = 2'-O-methyladenosine-3'- phosphorothioate
  modified_base 4: mod_base = OTHER; note = 2'-O-methylguanosine-3'- phosphorothioate
  modified_base 5: mod_base = OTHER; note = 2'-O-methylguanosine-3'- phosphorothioate
  modified_base 6: mod_base = OTHER; note = 2'-deoxythymidine-3'-phosphorothioate
  modified_base 7: mod_base = OTHER; note = 2'-deoxythymidine-3'-phosphorothioate
  modified_base 8: mod_base = OTHER; note = 5'-methyl-deoxycytidine-3'-phosphorothioate
  modified_base 9: mod_base = OTHER; note = 5'-methyl-deoxycytidine-3'-phosphorothioate
  modified_base 10: mod_base = OTHER; note = 2'-deoxythymidine-3'-phosphorothioate
  modified_base 11: mod_base = OTHER; note = 2'-deoxyadenosine-3'-phosphorothioate
  modified_base 12: mod_base = OTHER; note = 2'-deoxyguanosine-3'-phosphorothioate
  modified_base 13: mod_base = OTHER; note = 2'-deoxyguanosine-3'-phosphorothioate
  modified_base 14: mod_base = OTHER; note = 2'-deoxyadenosine-3'-phosphorothioate
  modified_base 15: mod_base = OTHER; note = 5'-methyl-deoxycytidine-3'-phosphorothioate
  modified_base 16: mod_base = OTHER; note = 2'-O-methyladenosine-3'- phosphorothioate
  modified_base 17: mod_base = OTHER; note = 2'-O-methylcytidine-3'- phosphorothioate
  modified_base 18: mod_base = OTHER; note = 2'-O-methylcytidine-3'- phosphorothioate
  modified_base 19: mod_base = OTHER; note = 2'-O-methylcytidine-3'- phosphorothioate
  modified_base 20: mod_base = OTHER; note = 2'-O-methyladenosine-3'-phosphate
  misc_feature 1..5: note = RNA
  misc_feature 6..15: note = DNA
  misc_feature 16..20: note = RNA
aaaggttcctaggacaccca

SEQ ID NO: 4274 - DNA, 20 bp, synthetic construct
  source 1..20: mol_type = other DNA
  modified_base 1: mod_base = OTHER; note = 2'-O-methyluridine-3'-phosphorothioate
  modified_base 2: mod_base = OTHER; note = 2'-O-methyluridine-3'-phosphorothioate
  modified_base 3: mod_base = OTHER; note = 2'-O-methyluridine-3'-phosphorothioate
  modified_base 4: mod_base = OTHER; note = 2'-O-methylcytidine-3'- phosphorothioate
  modified_base 5: mod_base = OTHER; note = 2'-O-methyluridine-3'-phosphorothioate
  modified_base 6: mod_base = OTHER; note = 2'-deoxythymidine-3'-phosphorothioate
  modified_base 7: mod_base = OTHER; note = 2'-deoxythymidine-3'-phosphorothioate
  modified_base 8: mod_base = OTHER; note = 5'-methyl-deoxycytidine-3'-phosphorothioate
  modified_base 9: mod_base = OTHER; note = 2'-deoxythymidine-3'-phosphorothioate
  modified_base 10: mod_base = OTHER; note = 2'-deoxyadenosine-3'-phosphorothioate
  modified_base 11: mod_base = OTHER; note = 2'-deoxyadenosine-3'-phosphorothioate
  modified_base 12: mod_base = OTHER; note = 2'-deoxyadenosine-3'-phosphorothioate
  modified_base 13: mod_base = OTHER; note = 2'-deoxyadenosine-3'-phosphorothioate
  modified_base 14: mod_base = OTHER; note = 2'-deoxyguanosine-3'-phosphorothioate
  modified_base 15: mod_base = OTHER; note = 2'-deoxyguanosine-3'-phosphorothioate
  modified_base 16: mod_base = OTHER; note = 2'-O-methyluridine-3'-phosphorothioate
  modified_base 17: mod_base = OTHER; note = 2'-O-methyluridine-3'-phosphorothioate
  modified_base 18: mod_base = OTHER; note = 2'-O-methylcytidine-3'- phosphorothioate
  modified_base 19: mod_base = OTHER; note = 2'-O-methylcytidine-3'- phosphorothioate
  modified_base 20: mod_base = OTHER; note = 2'-O-methyluridine-3'-phosphate
  misc_feature 1..5: note = RNA
  misc_feature 6..15: note = DNA
  misc_feature 16..20: note = RNA
tttctttctaaaaggttcct

SEQ ID NO: 4275 - DNA, 20 bp, synthetic construct
  source 1..20: mol_type = other DNA
  modified_base 1: mod_base = OTHER; note = 2'-O-methyluridine-3'-phosphorothioate
  modified_base 2: mod_base = OTHER; note = 2'-O-methylguanosine-3'- phosphorothioate
  modified_base 3: mod_base = OTHER; note = 2'-O-methyladenosine-3'- phosphorothioate
  modified_base 4: mod_base = OTHER; note = 2'-O-methyladenosine-3'- phosphorothioate
  modified_base 5: mod_base = OTHER; note = 2'-O-methyladenosine-3'- phosphorothioate
  modified_base 6: mod_base = OTHER; note = 2'-deoxyguanosine-3'-phosphorothioate
  modified_base 7: mod_base = OTHER; note = 2'-deoxythymidine-3'-phosphorothioate
  modified_base 8: mod_base = OTHER; note = 5'-methyl-deoxycytidine-3'-phosphorothioate
  modified_base 9: mod_base = OTHER; note = 5'-methyl-deoxycytidine-3'-phosphorothioate
  modified_base 10: mod_base = OTHER; note = 2'-deoxyadenosine-3'-phosphorothioate
  modified_base 11: mod_base = OTHER; note = 2'-deoxythymidine-3'-phosphorothioate
  modified_base 12: mod_base = OTHER; note = 2'-deoxythymidine-3'-phosphorothioate
  modified_base 13: mod_base = OTHER; note = 2'-deoxythymidine-3'-phosphorothioate
  modified_base 14: mod_base = OTHER; note = 5'-methyl-deoxycytidine-3'-phosphorothioate
  modified_base 15: mod_base = OTHER; note = 2'-deoxythymidine-3'-phosphorothioate
  modified_base 16: mod_base = OTHER; note = 2'-O-methyluridine-3'-phosphorothioate
  modified_base 17: mod_base = OTHER; note = 2'-O-methyluridine-3'-phosphorothioate
  modified_base 18: mod_base = OTHER; note = 2'-O-methylcytidine-3'- phosphorothioate
  modified_base 19: mod_base = OTHER; note = 2'-O-methyluridine-3'-phosphorothioate
  modified_base 20: mod_base = OTHER; note = 2'-O-methyladenosine-3'-phosphate
  misc_feature 1..5: note = RNA
  misc_feature 6..15: note = DNA
  misc_feature 16..20: note = RNA
tgaaagtccatttctttcta

SEQ ID NO: 4276 - DNA, 20 bp, synthetic construct
  source 1..20: mol_type = other DNA
  modified_base 1: mod_base = OTHER; note = 2'-O-methyluridine-3'-phosphorothioate
  modified_base 2: mod_base = OTHER; note = 2'-O-methyladenosine-3'- phosphorothioate
  modified_base 3: mod_base = OTHER; note = 2'-O-methyluridine-3'-phosphorothioate
  modified_base 4: mod_base = OTHER; note = 2'-O-methyladenosine-3'- phosphorothioate
  modified_base 5: mod_base = OTHER; note = 2'-O-methyluridine-3'-phosphorothioate
  modified_base 6: mod_base = OTHER; note = 2'-deoxythymidine-3'-phosphorothioate
  modified_base 7: mod_base = OTHER; note = 2'-deoxythymidine-3'-phosphorothioate
  modified_base 8: mod_base = OTHER; note = 5'-methyl-deoxycytidine-3'-phosphorothioate
  modified_base 9: mod_base = OTHER; note = 5'-methyl-deoxycytidine-3'-phosphorothioate
  modified_base 10: mod_base = OTHER; note = 2'-deoxyadenosine-3'-phosphorothioate
  modified_base 11: mod_base = OTHER; note = 2'-deoxyguanosine-3'-phosphorothioate
  modified_base 12: mod_base = OTHER; note = 2'-deoxyguanosine-3'-phosphorothioate
  modified_base 13: mod_base = OTHER; note = 2'-deoxyadenosine-3'-phosphorothioate
  modified_base 14: mod_base = OTHER; note = 2'-deoxythymidine-3'-phosphorothioate
  modified_base 15: mod_base = OTHER; note = 2'-deoxyguanosine-3'-phosphorothioate
  modified_base 16: mod_base = OTHER; note = 2'-O-methyladenosine-3'- phosphorothioate
  modified_base 17: mod_base = OTHER; note = 2'-O-methyladenosine-3'- phosphorothioate
  modified_base 18: mod_base = OTHER; note = 2'-O-methyladenosine-3'- phosphorothioate
  modified_base 19: mod_base = OTHER; note = 2'-O-methylguanosine-3'- phosphorothioate
  modified_base 20: mod_base = OTHER; note = 2'-O-methyluridine-3'-phosphate
  misc_feature 1..5: note = RNA
  misc_feature 6..15: note = DNA
  misc_feature 16..20: note = RNA
tatatttccaggatgaaagt

SEQ ID NO: 4277 - DNA, 20 bp, synthetic construct
  source 1..20: mol_type = other DNA
  modified_base 1: mod_base = OTHER; note = 2'-O-methyluridine-3'-phosphorothioate
  modified_base 2: mod_base = OTHER; note = 2'-O-methyladenosine-3'- phosphorothioate
  modified_base 3: mod_base = OTHER; note = 2'-O-methyladenosine-3'- phosphorothioate
  modified_base 4: mod_base = OTHER; note = 2'-O-methylcytidine-3'- phosphorothioate
  modified_base 5: mod_base = OTHER; note = 2'-O-methyladenosine-3'- phosphorothioate
  modified_base 6: mod_base = OTHER; note = 2'-deoxyguanosine-3'-phosphorothioate
  modified_base 7: mod_base = OTHER; note = 2'-deoxythymidine-3'-phosphorothioate
  modified_base 8: mod_base = OTHER; note = 2'-deoxythymidine-3'-phosphorothioate
  modified_base 9: mod_base = OTHER; note = 2'-deoxyadenosine-3'-phosphorothioate
  modified_base 10: mod_base = OTHER; note = 2'-deoxyadenosine-3'-phosphorothioate
  modified_base 11: mod_base = OTHER; note = 2'-deoxythymidine-3'-phosphorothioate
  modified_base 12: mod_base = OTHER; note = 2'-deoxyadenosine-3'-phosphorothioate
  modified_base 13: mod_base = OTHER; note = 2'-deoxythymidine-3'-phosphorothioate
  modified_base 14: mod_base = OTHER; note = 2'-deoxyadenosine-3'-phosphorothioate
  modified_base 15: mod_base = OTHER; note = 2'-deoxythymidine-3'-phosphorothioate
  modified_base 16: mod_base = OTHER; note = 2'-O-methyluridine-3'-phosphorothioate
  modified_base 17: mod_base = OTHER; note = 2'-O-methyluridine-3'-phosphorothioate
  modified_base 18: mod_base = OTHER; note = 2'-O-methylcytidine-3'- phosphorothioate
  modified_base 19: mod_base = OTHER; note = 2'-O-methylcytidine-3'- phosphorothioate
  modified_base 20: mod_base = OTHER; note = 2'-O-methyladenosine-3'-phosphate
  misc_feature 1..5: note = RNA
  misc_feature 6..15: note = DNA
  misc_feature 16..20: note = RNA
taacagttaatatatttcca

SEQ ID NO: 4278 - DNA, 20 bp, synthetic construct
  source 1..20: mol_type = other DNA
  modified_base 1: mod_base = OTHER; note = 2'-O-methylguanosine-3'- phosphorothioate
  modified_base 2: mod_base = OTHER; note = 2'-O-methyluridine-3'-phosphorothioate
  modified_base 3: mod_base = OTHER; note = 2'-O-methyluridine-3'-phosphorothioate
  modified_base 4: mod_base = OTHER; note = 2'-O-methyluridine-3'-phosphorothioate
  modified_base 5: mod_base = OTHER; note = 2'-O-methyluridine-3'-phosphorothioate
  modified_base 6: mod_base = OTHER; note = 5'-methyl-deoxycytidine-3'-phosphorothioate
  modified_base 7: mod_base = OTHER; note = 2'-deoxythymidine-3'-phosphorothioate
  modified_base 8: mod_base = OTHER; note = 2'-deoxythymidine-3'-phosphorothioate
  modified_base 9: mod_base = OTHER; note = 2'-deoxythymidine-3'-phosphorothioate
  modified_base 10: mod_base = OTHER; note = 2'-deoxythymidine-3'-phosphorothioate
  modified_base 11: mod_base = OTHER; note = 2'-deoxythymidine-3'-phosphorothioate
  modified_base 12: mod_base = OTHER; note = 2'-deoxyadenosine-3'-phosphorothioate
  modified_base 13: mod_base = OTHER; note = 2'-deoxyadenosine-3'-phosphorothioate
  modified_base 14: mod_base = OTHER; note = 5'-methyl-deoxycytidine-3'-phosphorothioate
  modified_base 15: mod_base = OTHER; note = 2'-deoxyadenosine-3'-phosphorothioate
  modified_base 16: mod_base = OTHER; note = 2'-O-methylguanosine-3'- phosphorothioate
  modified_base 17: mod_base = OTHER; note = 2'-O-methyluridine-3'-phosphorothioate
  modified_base 18: mod_base = OTHER; note = 2'-O-methyluridine-3'-phosphorothioate
  modified_base 19: mod_base = OTHER; note = 2'-O-methyladenosine-3'- phosphorothioate
  modified_base 20: mod_base = OTHER; note = 2'-O-methyladenosine-3'-phosphate
  misc_feature 1..5: note = RNA
  misc_feature 6..15: note = DNA
  misc_feature 16..20: note = RNA
gttttctttttaacagttaa

SEQ ID NO: 4279 - DNA, 20 bp, synthetic construct
  source 1..20: mol_type = other DNA
  modified_base 1: mod_base = OTHER; note = 2'-O-methylcytidine-3'- phosphorothioate
  modified_base 2: mod_base = OTHER; note = 2'-O-methyladenosine-3'- phosphorothioate
  modified_base 3: mod_base = OTHER; note = 2'-O-methylcytidine-3'- phosphorothioate
  modified_base 4: mod_base = OTHER; note = 2'-O-methyladenosine-3'- phosphorothioate
  modified_base 5: mod_base = OTHER; note = 2'-O-methyluridine-3'-phosphorothioate
  modified_base 6: mod_base = OTHER; note = 2'-deoxythymidine-3'-phosphorothioate
  modified_base 7: mod_base = OTHER; note = 2'-deoxythymidine-3'-phosphorothioate
  modified_base 8: mod_base = OTHER; note = 2'-deoxythymidine-3'-phosphorothioate
  modified_base 9: mod_base = OTHER; note = 5'-methyl-deoxycytidine-3'-phosphorothioate
  modified_base 10: mod_base = OTHER; note = 2'-deoxyadenosine-3'-phosphorothioate
  modified_base 11: mod_base = OTHER; note = 2'-deoxyadenosine-3'-phosphorothioate
  modified_base 12: mod_base = OTHER; note = 2'-deoxythymidine-3'-phosphorothioate
  modified_base 13: mod_base = OTHER; note = 2'-deoxyguanosine-3'-phosphorothioate
  modified_base 14: mod_base = OTHER; note = 2'-deoxythymidine-3'-phosphorothioate
  modified_base 15: mod_base = OTHER; note = 2'-deoxythymidine-3'-phosphorothioate
  modified_base 16: mod_base = OTHER; note = 2'-O-methyluridine-3'-phosphorothioate
  modified_base 17: mod_base = OTHER; note = 2'-O-methyluridine-3'-phosphorothioate
  modified_base 18: mod_base = OTHER; note = 2'-O-methylcytidine-3'- phosphorothioate
  modified_base 19: mod_base = OTHER; note = 2'-O-methyluridine-3'-phosphorothioate
  modified_base 20: mod_base = OTHER; note = 2'-O-methyluridine-3'-phosphate
  misc_feature 1..5: note = RNA
  misc_feature 6..15: note = DNA
  misc_feature 16..20: note = RNA
cacattttcaatgttttctt

SEQ ID NO: 4280 - DNA, 20 bp, synthetic construct
  source 1..20: mol_type = other DNA
  modified_base 1: mod_base = OTHER; note = 2'-O-methyladenosine-3'- phosphorothioate
  modified_base 2: mod_base = OTHER; note = 2'-O-methylcytidine-3'- phosphorothioate
  modified_base 3: mod_base = OTHER; note = 2'-O-methylguanosine-3'- phosphorothioate
  modified_base 4: mod_base = OTHER; note = 2'-O-methyluridine-3'-phosphorothioate
  modified_base 5: mod_base = OTHER; note = 2'-O-methyluridine-3'-phosphorothioate
  modified_base 6: mod_base = OTHER; note = 2'-deoxyguanosine-3'-phosphorothioate
  modified_base 7: mod_base = OTHER; note = 2'-deoxythymidine-3'-phosphorothioate
  modified_base 8: mod_base = OTHER; note = 5'-methyl-deoxycytidine-3'-phosphorothioate
  modified_base 9: mod_base = OTHER; note = 2'-deoxythymidine-3'-phosphorothioate
  modified_base 10: mod_base = OTHER; note = 2'-deoxyadenosine-3'-phosphorothioate
  modified_base 11: mod_base = OTHER; note = 2'-deoxyadenosine-3'-phosphorothioate
  modified_base 12: mod_base = OTHER; note = 2'-deoxyadenosine-3'-phosphorothioate
  modified_base 13: mod_base = OTHER; note = 5'-methyl-deoxycytidine-3'-phosphorothioate
  modified_base 14: mod_base = OTHER; note = 2'-deoxyadenosine-3'-phosphorothioate
  modified_base 15: mod_base = OTHER; note = 5'-methyl-deoxycytidine-3'-phosphorothioate
  modified_base 16: mod_base = OTHER; note = 2'-O-methyladenosine-3'- phosphorothioate
  modified_base 17: mod_base = OTHER; note = 2'-O-methyluridine-3'-phosphorothioate
  modified_base 18: mod_base = OTHER; note = 2'-O-methyluridine-3'-phosphorothioate
  modified_base 19: mod_base = OTHER; note = 2'-O-methyluridine-3'-phosphorothioate
  modified_base 20: mod_base = OTHER; note = 2'-O-methyluridine-3'-phosphate
  misc_feature 1..5: note = RNA
  misc_feature 6..15: note = DNA
  misc_feature 16..20: note = RNA
acgttgtctaaacacatttt

SEQ ID NO: 4281 - DNA, 20 bp, synthetic construct
  source 1..20: mol_type = other DNA
  modified_base 1: mod_base = OTHER; note = 2'-O-methylcytidine-3'- phosphorothioate
  modified_base 2: mod_base = OTHER; note = 2'-O-methyladenosine-3'- phosphorothioate
  modified_base 3: mod_base = OTHER; note = 2'-O-methylguanosine-3'- phosphorothioate
  modified_base 4: mod_base = OTHER; note = 2'-O-methylguanosine-3'- phosphorothioate
  modified_base 5: mod_base = OTHER; note = 2'-O-methylguanosine-3'- phosphorothioate
  modified_base 6: mod_base = OTHER; note = 2'-deoxyguanosine-3'-phosphorothioate
  modified_base 7: mod_base = OTHER; note = 2'-deoxyadenosine-3'-phosphorothioate
  modified_base 8: mod_base = OTHER; note = 2'-deoxythymidine-3'-phosphorothioate
  modified_base 9: mod_base = OTHER; note = 2'-deoxyguanosine-3'-phosphorothioate
  modified_base 10: mod_base = OTHER; note = 2'-deoxyadenosine-3'-phosphorothioate
  modified_base 11: mod_base = OTHER; note = 5'-methyl-deoxycytidine-3'-phosphorothioate
  modified_base 12: mod_base = OTHER; note = 2'-deoxyguanosine-3'-phosphorothioate
  modified_base 13: mod_base = OTHER; note = 2'-deoxythymidine-3'-phosphorothioate
  modified_base 14: mod_base = OTHER; note = 2'-deoxythymidine-3'-phosphorothioate
  modified_base 15: mod_base = OTHER; note = 2'-deoxyguanosine-3'-phosphorothioate
  modified_base 16: mod_base = OTHER; note = 2'-O-methyluridine-3'-phosphorothioate
  modified_base 17: mod_base = OTHER; note = 2'-O-methylcytidine-3'- phosphorothioate
  modified_base 18: mod_base = OTHER; note = 2'-O-methyluridine-3'-phosphorothioate
  modified_base 19: mod_base = OTHER; note = 2'-O-methyladenosine-3'- phosphorothioate
  modified_base 20: mod_base = OTHER; note = 2'-O-methyladenosine-3'-phosphate
  misc_feature 1..5: note = RNA
  misc_feature 6..15: note = DNA
  misc_feature 16..20: note = RNA
caggggatgacgttgtctaa

SEQ ID NO: 4282 - DNA, 20 bp, synthetic construct
  source 1..20: mol_type = other DNA
  modified_base 1: mod_base = OTHER; note = 2'-O-methylcytidine-3'- phosphorothioate
  modified_base 2: mod_base = OTHER; note = 2'-O-methyladenosine-3'- phosphorothioate
  modified_base 3: mod_base = OTHER; note = 2'-O-methylcytidine-3'- phosphorothioate
  modified_base 4: mod_base = OTHER; note = 2'-O-methyluridine-3'-phosphorothioate
  modified_base 5: mod_base = OTHER; note = 2'-O-methyluridine-3'-phosphorothioate
  modified_base 6: mod_base = OTHER; note = 2'-deoxythymidine-3'-phosphorothioate
  modified_base 7: mod_base = OTHER; note = 2'-deoxyadenosine-3'-phosphorothioate
  modified_base 8: mod_base = OTHER; note = 2'-deoxyguanosine-3'-phosphorothioate
  modified_base 9: mod_base = OTHER; note = 5'-methyl-deoxycytidine-3'-phosphorothioate
  modified_base 10: mod_base = OTHER; note = 5'-methyl-deoxycytidine-3'-phosphorothioate
  modified_base 11: mod_base = OTHER; note = 2'-deoxythymidine-3'-phosphorothioate
  modified_base 12: mod_base = OTHER; note = 2'-deoxyguanosine-3'-phosphorothioate
  modified_base 13: mod_base = OTHER; note = 5'-methyl-deoxycytidine-3'-phosphorothioate
  modified_base 14: mod_base = OTHER; note = 5'-methyl-deoxycytidine-3'-phosphorothioate
  modified_base 15: mod_base = OTHER; note = 2'-deoxyadenosine-3'-phosphorothioate
  modified_base 16: mod_base = OTHER; note = 2'-O-methylguanosine-3'- phosphorothioate
  modified_base 17: mod_base = OTHER; note = 2'-O-methylguanosine-3'- phosphorothioate
  modified_base 18: mod_base = OTHER; note = 2'-O-methylguanosine-3'- phosphorothioate
  modified_base 19: mod_base = OTHER; note = 2'-O-methylguanosine-3'- phosphorothioate
  modified_base 20: mod_base = OTHER; note = 2'-O-methyladenosine-3'-phosphate
  misc_feature 1..5: note = RNA
  misc_feature 6..15: note = DNA
  misc_feature 16..20: note = RNA
cactttagcctgccagggga

SEQ ID NO: 4283 - DNA, 20 bp, synthetic construct
  source 1..20: mol_type = other DNA
  modified_base 1: mod_base = OTHER; note = 2'-O-methyladenosine-3'- phosphorothioate
  modified_base 2: mod_base = OTHER; note = 2'-O-methyladenosine-3'- phosphorothioate
  modified_base 3: mod_base = OTHER; note = 2'-O-methyladenosine-3'- phosphorothioate
  modified_base 4: mod_base = OTHER; note = 2'-O-methylguanosine-3'- phosphorothioate
  modified_base 5: mod_base = OTHER; note = 2'-O-methylguanosine-3'- phosphorothioate
  modified_base 6: mod_base = OTHER; note = 2'-deoxyadenosine-3'-phosphorothioate
  modified_base 7: mod_base = OTHER; note = 2'-deoxythymidine-3'-phosphorothioate
  modified_base 8: mod_base = OTHER; note = 2'-deoxyadenosine-3'-phosphorothioate
  modified_base 9: mod_base = OTHER; note = 5'-methyl-deoxycytidine-3'-phosphorothioate
  modified_base 10: mod_base = OTHER; note = 2'-deoxyadenosine-3'-phosphorothioate
  modified_base 11: mod_base = OTHER; note = 2'-deoxyguanosine-3'-phosphorothioate
  modified_base 12: mod_base = OTHER; note = 5'-methyl-deoxycytidine-3'-phosphorothioate
  modified_base 13: mod_base = OTHER; note = 2'-deoxyadenosine-3'-phosphorothioate
  modified_base 14: mod_base = OTHER; note = 5'-methyl-deoxycytidine-3'-phosphorothioate
  modified_base 15: mod_base = OTHER; note = 2'-deoxythymidine-3'-phosphorothioate
  modified_base 16: mod_base = OTHER; note = 2'-O-methyluridine-3'-phosphorothioate
  modified_base 17: mod_base = OTHER; note = 2'-O-methyluridine-3'-phosphorothioate
  modified_base 18: mod_base = OTHER; note = 2'-O-methyladenosine-3'- phosphorothioate
  modified_base 19: mod_base = OTHER; note = 2'-O-methylguanosine-3'- phosphorothioate
  modified_base 20: mod_base = OTHER; note = 2'-O-methylcytidine-3'-phosphate
  misc_feature 1..5: note = RNA
  misc_feature 6..15: note = DNA
  misc_feature 16..20: note = RNA
aaaggatacagcactttagc

SEQ ID NO: 4284 - DNA, 20 bp, synthetic construct
  source 1..20: mol_type = other DNA
  modified_base 1: mod_base = OTHER; note = 2'-O-methylcytidine-3'- phosphorothioate
  modified_base 2: mod_base = OTHER; note = 2'-O-methyladenosine-3'- phosphorothioate
  modified_base 3: mod_base = OTHER; note = 2'-O-methyladenosine-3'- phosphorothioate
  modified_base 4: mod_base = OTHER; note = 2'-O-methyluridine-3'-phosphorothioate
  modified_base 5: mod_base = OTHER; note = 2'-O-methyluridine-3'-phosphorothioate
  modified_base 6: mod_base = OTHER; note = 2'-deoxythymidine-3'-phosphorothioate
  modified_base 7: mod_base = OTHER; note = 2'-deoxythymidine-3'-phosphorothioate
  modified_base 8: mod_base = OTHER; note = 2'-deoxyadenosine-3'-phosphorothioate
  modified_base 9: mod_base = OTHER; note = 5'-methyl-deoxycytidine-3'-phosphorothioate
  modified_base 10: mod_base = OTHER; note = 2'-deoxythymidine-3'-phosphorothioate
  modified_base 11: mod_base = OTHER; note = 2'-deoxyadenosine-3'-phosphorothioate
  modified_base 12: mod_base = OTHER; note = 2'-deoxyadenosine-3'-phosphorothioate
  modified_base 13: mod_base = OTHER; note = 2'-deoxyadenosine-3'-phosphorothioate
  modified_base 14: mod_base = OTHER; note = 2'-deoxyguanosine-3'-phosphorothioate
  modified_base 15: mod_base = OTHER; note = 2'-deoxyguanosine-3'-phosphorothioate
  modified_base 16: mod_base = OTHER; note = 2'-O-methyladenosine-3'- phosphorothioate
  modified_base 17: mod_base = OTHER; note = 2'-O-methyluridine-3'-phosphorothioate
  modified_base 18: mod_base = OTHER; note = 2'-O-methyladenosine-3'- phosphorothioate
  modified_base 19: mod_base = OTHER; note = 2'-O-methylcytidine-3'- phosphorothioate
  modified_base 20: mod_base = OTHER; note = 2'-O-methyladenosine-3'-phosphate
  misc_feature 1..5: note = RNA
  misc_feature 6..15: note = DNA
  misc_feature 16..20: note = RNA
caattttactaaaggataca

SEQ ID NO: 4285 - DNA, 20 bp, synthetic construct
  source 1..20: mol_type = other DNA
  modified_base 1: mod_base = OTHER; note = 2'-O-methyluridine-3'-phosphorothioate
  modified_base 2: mod_base = OTHER; note = 2'-O-methyluridine-3'-phosphorothioate
  modified_base 3: mod_base = OTHER; note = 2'-O-methylguanosine-3'- phosphorothioate
  modified_base 4: mod_base = OTHER; note = 2'-O-methylcytidine-3'- phosphorothioate
  modified_base 5: mod_base = OTHER; note = 2'-O-methyluridine-3'-phosphorothioate
  modified_base 6: mod_base = OTHER; note = 2'-deoxyadenosine-3'-phosphorothioate
  modified_base 7: mod_base = OTHER; note = 5'-methyl-deoxycytidine-3'-phosphorothioate
  modified_base 8: mod_base = OTHER; note = 5'-methyl-deoxycytidine-3'-phosphorothioate
  modified_base 9: mod_base = OTHER; note = 2'-deoxythymidine-3'-phosphorothioate
  modified_base 10: mod_base = OTHER; note = 5'-methyl-deoxycytidine-3'-phosphorothioate
  modified_base 11: mod_base = OTHER; note = 5'-methyl-deoxycytidine-3'-phosphorothioate
  modified_base 12: mod_base = OTHER; note = 2'-deoxyadenosine-3'-phosphorothioate
  modified_base 13: mod_base = OTHER; note = 2'-deoxyadenosine-3'-phosphorothioate
  modified_base 14: mod_base = OTHER; note = 2'-deoxythymidine-3'-phosphorothioate
  modified_base 15: mod_base = OTHER; note = 2'-deoxythymidine-3'-phosphorothioate
  modified_base 16: mod_base = OTHER; note = 2'-O-methyluridine-3'-phosphorothioate
  modified_base 17: mod_base = OTHER; note = 2'-O-methyluridine-3'-phosphorothioate
  modified_base 18: mod_base = OTHER; note = 2'-O-methyladenosine-3'- phosphorothioate
  modified_base 19: mod_base = OTHER; note = 2'-O-methylcytidine-3'- phosphorothioate
  modified_base 20: mod_base = OTHER; note = 2'-O-methyluridine-3'-phosphate
  misc_feature 1..5: note = RNA
  misc_feature 6..15: note = DNA
  misc_feature 16..20: note = RNA
ttgctacctccaattttact

SEQ ID NO: 4286 - DNA, 20 bp, synthetic construct
  source 1..20: mol_type = other DNA
  modified_base 1: mod_base = OTHER; note = 2'-O-methylcytidine-3'- phosphorothioate
  modified_base 2: mod_base = OTHER; note = 2'-O-methyladenosine-3'- phosphorothioate
  modified_base 3: mod_base = OTHER; note = 2'-O-methylcytidine-3'- phosphorothioate
  modified_base 4: mod_base = OTHER; note = 2'-O-methylcytidine-3'- phosphorothioate
  modified_base 5: mod_base = OTHER; note = 2'-O-methyluridine-3'-phosphorothioate
  modified_base 6: mod_base = OTHER; note = 2'-deoxythymidine-3'-phosphorothioate
  modified_base 7: mod_base = OTHER; note = 2'-deoxyadenosine-3'-phosphorothioate
  modified_base 8: mod_base = OTHER; note = 2'-deoxyguanosine-3'-phosphorothioate
  modified_base 9: mod_base = OTHER; note = 2'-deoxythymidine-3'-phosphorothioate
  modified_base 10: mod_base = OTHER; note = 2'-deoxyguanosine-3'-phosphorothioate
  modified_base 11: mod_base = OTHER; note = 2'-deoxythymidine-3'-phosphorothioate
  modified_base 12: mod_base = OTHER; note = 2'-deoxythymidine-3'-phosphorothioate
  modified_base 13: mod_base = OTHER; note = 2'-deoxythymidine-3'-phosphorothioate
  modified_base 14: mod_base = OTHER; note = 2'-deoxyguanosine-3'-phosphorothioate
  modified_base 15: mod_base = OTHER; note = 5'-methyl-deoxycytidine-3'-phosphorothioate
  modified_base 16: mod_base = OTHER; note = 2'-O-methyluridine-3'-phosphorothioate
  modified_base 17: mod_base = OTHER; note = 2'-O-methyladenosine-3'- phosphorothioate
  modified_base 18: mod_base = OTHER; note = 2'-O-methylcytidine-3'- phosphorothioate
  modified_base 19: mod_base = OTHER; note = 2'-O-methylcytidine-3'- phosphorothioate
  modified_base 20: mod_base = OTHER; note = 2'-O-methyluridine-3'-phosphate
  misc_feature 1..5: note = RNA
  misc_feature 6..15: note = DNA
  misc_feature 16..20: note = RNA
caccttagtgtttgctacct

SEQ ID NO: 4287 - DNA, 20 bp, synthetic construct
  source 1..20: mol_type = other DNA
  modified_base 1: mod_base = OTHER; note = 2'-O-methyluridine-3'-phosphorothioate
  modified_base 2: mod_base = OTHER; note = 2'-O-methylcytidine-3'- phosphorothioate
  modified_base 3: mod_base = OTHER; note = 2'-O-methyladenosine-3'- phosphorothioate
  modified_base 4: mod_base = OTHER; note = 2'-O-methyluridine-3'-phosphorothioate
  modified_base 5: mod_base = OTHER; note = 2'-O-methyluridine-3'-phosphorothioate
  modified_base 6: mod_base = OTHER; note = 2'-deoxyadenosine-3'-phosphorothioate
  modified_base 7: mod_base = OTHER; note = 2'-deoxythymidine-3'-phosphorothioate
  modified_base 8: mod_base = OTHER; note = 5'-methyl-deoxycytidine-3'-phosphorothioate
  modified_base 9: mod_base = OTHER; note = 2'-deoxythymidine-3'-phosphorothioate
  modified_base 10: mod_base = OTHER; note = 2'-deoxythymidine-3'-phosphorothioate
  modified_base 11: mod_base = OTHER; note = 2'-deoxythymidine-3'-phosphorothioate
  modified_base 12: mod_base = OTHER; note = 2'-deoxythymidine-3'-phosphorothioate
  modified_base 13: mod_base = OTHER; note = 5'-methyl-deoxycytidine-3'-phosphorothioate
  modified_base 14: mod_base = OTHER; note = 2'-deoxyadenosine-3'-phosphorothioate
  modified_base 15: mod_base = OTHER; note = 5'-methyl-deoxycytidine-3'-phosphorothioate
  modified_base 16: mod_base = OTHER; note = 2'-O-methylcytidine-3'- phosphorothioate
  modified_base 17: mod_base = OTHER; note = 2'-O-methyluridine-3'-phosphorothioate
  modified_base 18: mod_base = OTHER; note = 2'-O-methyluridine-3'-phosphorothioate
  modified_base 19: mod_base = OTHER; note = 2'-O-methyladenosine-3'- phosphorothioate
  modified_base 20: mod_base = OTHER; note = 2'-O-methylguanosine-3'-phosphate
  misc_feature 1..5: note = RNA
  misc_feature 6..15: note = DNA
  misc_feature 16..20: note = RNA
tcattatcttttcaccttag

SEQ ID NO: 4288 - DNA, 20 bp, synthetic construct
  source 1..20: mol_type = other DNA
  modified_base 1: mod_base = OTHER; note = 2'-O-methyladenosine-3'- phosphorothioate
  modified_base 2: mod_base = OTHER; note = 2'-O-methyladenosine-3'- phosphorothioate
  modified_base 3: mod_base = OTHER; note = 2'-O-methylcytidine-3'- phosphorothioate
  modified_base 4: mod_base = OTHER; note = 2'-O-methyladenosine-3'- phosphorothioate
  modified_base 5: mod_base = OTHER; note = 2'-O-methyladenosine-3'- phosphorothioate
  modified_base 6: mod_base = OTHER; note = 2'-deoxythymidine-3'-phosphorothioate
  modified_base 7: mod_base = OTHER; note = 2'-deoxyguanosine-3'-phosphorothioate
  modified_base 8: mod_base = OTHER; note = 2'-deoxyadenosine-3'-phosphorothioate
  modified_base 9: mod_base = OTHER; note = 2'-deoxyguanosine-3'-phosphorothioate
  modified_base 10: mod_base = OTHER; note = 2'-deoxyadenosine-3'-phosphorothioate
  modified_base 11: mod_base = OTHER; note = 2'-deoxythymidine-3'-phosphorothioate
  modified_base 12: mod_base = OTHER; note = 5'-methyl-deoxycytidine-3'-phosphorothioate
  modified_base 13: mod_base = OTHER; note = 2'-deoxyadenosine-3'-phosphorothioate
  modified_base 14: mod_base = OTHER; note = 2'-deoxythymidine-3'-phosphorothioate
  modified_base 15: mod_base = OTHER; note = 2'-deoxythymidine-3'-phosphorothioate
  modified_base 16: mod_base = OTHER; note = 2'-O-methyladenosine-3'- phosphorothioate
  modified_base 17: mod_base = OTHER; note = 2'-O-methyluridine-3'-phosphorothioate
  modified_base 18: mod_base = OTHER; note = 2'-O-methylcytidine-3'- phosphorothioate
  modified_base 19: mod_base = OTHER; note = 2'-O-methyluridine-3'-phosphorothioate
  modified_base 20: mod_base = OTHER; note = 2'-O-methyluridine-3'-phosphate
  misc_feature 1..5: note = RNA
  misc_feature 6..15: note = DNA
  misc_feature 16..20: note = RNA
aacaatgagatcattatctt

SEQ ID NO: 4289 - DNA, 20 bp, synthetic construct
  source 1..20: mol_type = other DNA
  modified_base 1: mod_base = OTHER; note = 2'-O-methyluridine-3'-phosphorothioate
  modified_base 2: mod_base = OTHER; note = 2'-O-methyladenosine-3'- phosphorothioate
  modified_base 3: mod_base = OTHER; note = 2'-O-methylcytidine-3'- phosphorothioate
  modified_base 4: mod_base = OTHER; note = 2'-O-methyladenosine-3'- phosphorothioate
  modified_base 5: mod_base = OTHER; note = 2'-O-methylguanosine-3'- phosphorothioate
  modified_base 6: mod_base = OTHER; note = 2'-deoxyguanosine-3'-phosphorothioate
  modified_base 7: mod_base = OTHER; note = 2'-deoxythymidine-3'-phosphorothioate
  modified_base 8: mod_base = OTHER; note = 2'-deoxythymidine-3'-phosphorothioate
  modified_base 9: mod_base = OTHER; note = 2'-deoxyadenosine-3'-phosphorothioate
  modified_base 10: mod_base = OTHER; note = 2'-deoxyadenosine-3'-phosphorothioate
  modified_base 11: mod_base = OTHER; note = 2'-deoxythymidine-3'-phosphorothioate
  modified_base 12: mod_base = OTHER; note = 2'-deoxyadenosine-3'-phosphorothioate
  modified_base 13: mod_base = OTHER; note = 2'-deoxyadenosine-3'-phosphorothioate
  modified_base 14: mod_base = OTHER; note = 2'-deoxyadenosine-3'-phosphorothioate
  modified_base 15: mod_base = OTHER; note = 5'-methyl-deoxycytidine-3'-phosphorothioate
  modified_base 16: mod_base = OTHER; note = 2'-O-methyladenosine-3'- phosphorothioate
  modified_base 17: mod_base = OTHER; note = 2'-O-methyladenosine-3'- phosphorothioate
  modified_base 18: mod_base = OTHER; note = 2'-O-methyluridine-3'-phosphorothioate
  modified_base 19: mod_base = OTHER; note = 2'-O-methylguanosine-3'- phosphorothioate
  modified_base 20: mod_base = OTHER; note = 2'-O-methyladenosine-3'-phosphate
  misc_feature 1..5: note = RNA
  misc_feature 6..15: note = DNA
  misc_feature 16..20: note = RNA
tacaggttaataaacaatga

SEQ ID NO: 4290 - DNA, 20 bp, synthetic construct
  source 1..20: mol_type = other DNA
  modified_base 1: mod_base = OTHER; note = 2'-O-methylguanosine-3'- phosphorothioate
  modified_base 2: mod_base = OTHER; note = 2'-O-methyluridine-3'-phosphorothioate
  modified_base 3: mod_base = OTHER; note = 2'-O-methyladenosine-3'- phosphorothioate
  modified_base 4: mod_base = OTHER; note = 2'-O-methyladenosine-3'- phosphorothioate
  modified_base 5: mod_base = OTHER; note = 2'-O-methyladenosine-3'- phosphorothioate
  modified_base 6: mod_base = OTHER; note = 5'-methyl-deoxycytidine-3'-phosphorothioate
  modified_base 7: mod_base = OTHER; note = 2'-deoxyadenosine-3'-phosphorothioate
  modified_base 8: mod_base = OTHER; note = 2'-deoxyguanosine-3'-phosphorothioate
  modified_base 9: mod_base = OTHER; note = 2'-deoxyadenosine-3'-phosphorothioate
  modified_base 10: mod_base = OTHER; note = 2'-deoxyadenosine-3'-phosphorothioate
  modified_base 11: mod_base = OTHER; note = 2'-deoxythymidine-3'-phosphorothioate
  modified_base 12: mod_base = OTHER; note = 2'-deoxyadenosine-3'-phosphorothioate
  modified_base 13: mod_base = OTHER; note = 5'-methyl-deoxycytidine-3'-phosphorothioate
  modified_base 14: mod_base = OTHER; note = 2'-deoxyadenosine-3'-phosphorothioate
  modified_base 15: mod_base = OTHER; note = 2'-deoxyguanosine-3'-phosphorothioate
  modified_base 16: mod_base = OTHER; note = 2'-O-methylguanosine-3'- phosphorothioate
  modified_base 17: mod_base = OTHER; note = 2'-O-methyluridine-3'-phosphorothioate
  modified_base 18: mod_base = OTHER; note = 2'-O-methyluridine-3'-phosphorothioate
  modified_base 19: mod_base = OTHER; note = 2'-O-methyladenosine-3'- phosphorothioate
  modified_base 20: mod_base = OTHER; note = 2'-O-methyladenosine-3'-phosphate
  misc_feature 1..5: note = RNA
  misc_feature 6..15: note = DNA
  misc_feature 16..20: note = RNA
gtaaacagaatacaggttaa

SEQ ID NO: 4291 - DNA, 20 bp, synthetic construct
  source 1..20: mol_type = other DNA
  modified_base 1: mod_base = OTHER; note = 2'-O-methyluridine-3'-phosphorothioate
  modified_base 2: mod_base = OTHER; note = 2'-O-methyluridine-3'-phosphorothioate
  modified_base 3: mod_base = OTHER; note = 2'-O-methyluridine-3'-phosphorothioate
  modified_base 4: mod_base = OTHER; note = 2'-O-methyladenosine-3'- phosphorothioate
  modified_base 5: mod_base = OTHER; note = 2'-O-methyladenosine-3'- phosphorothioate
  modified_base 6: mod_base = OTHER; note = 2'-deoxyadenosine-3'-phosphorothioate
  modified_base 7: mod_base = OTHER; note = 2'-deoxyguanosine-3'-phosphorothioate
  modified_base 8: mod_base = OTHER; note = 2'-deoxyadenosine-3'-phosphorothioate
  modified_base 9: mod_base = OTHER; note = 5'-methyl-deoxycytidine-3'-phosphorothioate
  modified_base 10: mod_base = OTHER; note = 2'-deoxyadenosine-3'-phosphorothioate
  modified_base 11: mod_base = OTHER; note = 2'-deoxythymidine-3'-phosphorothioate
  modified_base 12: mod_base = OTHER; note = 2'-deoxyguanosine-3'-phosphorothioate
  modified_base 13: mod_base = OTHER; note = 2'-deoxythymidine-3'-phosphorothioate
  modified_base 14: mod_base = OTHER; note = 2'-deoxyadenosine-3'-phosphorothioate
  modified_base 15: mod_base = OTHER; note = 2'-deoxyadenosine-3'-phosphorothioate
  modified_base 16: mod_base = OTHER; note = 2'-O-methyladenosine-3'- phosphorothioate
  modified_base 17: mod_base = OTHER; note = 2'-O-methylcytidine-3'- phosphorothioate
  modified_base 18: mod_base = OTHER; note = 2'-O-methyladenosine-3'- phosphorothioate
  modified_base 19: mod_base = OTHER; note = 2'-O-methylguanosine-3'- phosphorothioate
  modified_base 20: mod_base = OTHER; note = 2'-O-methyladenosine-3'-phosphate
  misc_feature 1..5: note = RNA
  misc_feature 6..15: note = DNA
  misc_feature 16..20: note = RNA
tttaaagacatgtaaacaga

SEQ ID NO: 4292 - DNA, 20 bp, synthetic construct
  source 1..20: mol_type = other DNA
  modified_base 1: mod_base = OTHER; note = 2'-O-methyladenosine-3'- phosphorothioate
  modified_base 2: mod_base = OTHER; note = 2'-O-methyladenosine-3'- phosphorothioate
  modified_base 3: mod_base = OTHER; note = 2'-O-methylguanosine-3'- phosphorothioate
  modified_base 4: mod_base = OTHER; note = 2'-O-methyladenosine-3'- phosphorothioate
  modified_base 5: mod_base = OTHER; note = 2'-O-methyladenosine-3'- phosphorothioate
  modified_base 6: mod_base = OTHER; note = 5'-methyl-deoxycytidine-3'-phosphorothioate
  modified_base 7: mod_base = OTHER; note = 5'-methyl-deoxycytidine-3'-phosphorothioate
  modified_base 8: mod_base = OTHER; note = 2'-deoxyadenosine-3'-phosphorothioate
  modified_base 9: mod_base = OTHER; note = 5'-methyl-deoxycytidine-3'-phosphorothioate
  modified_base 10: mod_base = OTHER; note = 2'-deoxythymidine-3'-phosphorothioate
  modified_base 11: mod_base = OTHER; note = 2'-deoxyguanosine-3'-phosphorothioate
  modified_base 12: mod_base = OTHER; note = 2'-deoxythymidine-3'-phosphorothioate
  modified_base 13: mod_base = OTHER; note = 2'-deoxythymidine-3'-phosphorothioate
  modified_base 14: mod_base = OTHER; note = 2'-deoxythymidine-3'-phosphorothioate
  modified_base 15: mod_base = OTHER; note = 2'-deoxythymidine-3'-phosphorothioate
  modified_base 16: mod_base = OTHER; note = 2'-O-methyladenosine-3'- phosphorothioate
  modified_base 17: mod_base = OTHER; note = 2'-O-methyladenosine-3'- phosphorothioate
  modified_base 18: mod_base = OTHER; note = 2'-O-methyladenosine-3'- phosphorothioate
  modified_base 19: mod_base = OTHER; note = 2'-O-methylguanosine-3'- phosphorothioate
  modified_base 20: mod_base = OTHER; note = 2'-O-methyladenosine-3'-phosphate
  misc_feature 1..5: note = RNA
  misc_feature 6..15: note = DNA
  misc_feature 16..20: note = RNA
aagaaccactgttttaaaga

SEQ ID NO: 4293 - DNA, 20 bp, synthetic construct
  source 1..20: mol_type = other DNA
  modified_base 1: mod_base = OTHER; note = 2'-O-methylcytidine-3'- phosphorothioate
  modified_base 2: mod_base = OTHER; note = 2'-O-methyluridine-3'-phosphorothioate
  modified_base 3: mod_base = OTHER; note = 2'-O-methyluridine-3'-phosphorothioate
  modified_base 4: mod_base = OTHER; note = 2'-O-methyladenosine-3'- phosphorothioate
  modified_base 5: mod_base = OTHER; note = 2'-O-methylcytidine-3'- phosphorothioate
  modified_base 6: mod_base = OTHER; note = 2'-deoxyadenosine-3'-phosphorothioate
  modified_base 7: mod_base = OTHER; note = 2'-deoxyadenosine-3'-phosphorothioate
  modified_base 8: mod_base = OTHER; note = 2'-deoxythymidine-3'-phosphorothioate
  modified_base 9: mod_base = OTHER; note = 2'-deoxythymidine-3'-phosphorothioate
  modified_base 10: mod_base = OTHER; note = 2'-deoxythymidine-3'-phosphorothioate
  modified_base 11: mod_base = OTHER; note = 2'-deoxyadenosine-3'-phosphorothioate
  modified_base 12: mod_base = OTHER; note = 2'-deoxyadenosine-3'-phosphorothioate
  modified_base 13: mod_base = OTHER; note = 2'-deoxyguanosine-3'-phosphorothioate
  modified_base 14: mod_base = OTHER; note = 2'-deoxyadenosine-3'-phosphorothioate
  modified_base 15: mod_base = OTHER; note = 2'-deoxyadenosine-3'-phosphorothioate
  modified_base 16: mod_base = OTHER; note = 2'-O-methylcytidine-3'- phosphorothioate
  modified_base 17: mod_base = OTHER; note = 2'-O-methylcytidine-3'- phosphorothioate
  modified_base 18: mod_base = OTHER; note = 2'-O-methyladenosine-3'- phosphorothioate
  modified_base 19: mod_base = OTHER; note = 2'-O-methylcytidine-3'- phosphorothioate
  modified_base 20: mod_base = OTHER; note = 2'-O-methyluridine-3'-phosphate
  misc_feature 1..5: note = RNA
  misc_feature 6..15: note = DNA
  misc_feature 16..20: note = RNA
cttacaatttaagaaccact

SEQ ID NO: 4294 - DNA, 20 bp, synthetic construct
  source 1..20: mol_type = other DNA
  modified_base 1: mod_base = OTHER; note = 2'-O-methylcytidine-3'- phosphorothioate
  modified_base 2: mod_base = OTHER; note = 2'-O-methyluridine-3'-phosphorothioate
  modified_base 3: mod_base = OTHER; note = 2'-O-methyluridine-3'-phosphorothioate
  modified_base 4: mod_base = OTHER; note = 2'-O-methyluridine-3'-phosphorothioate
  modified_base 5: mod_base = OTHER; note = 2'-O-methylguanosine-3'- phosphorothioate
  modified_base 6: mod_base = OTHER; note = 2'-deoxyadenosine-3'-phosphorothioate
  modified_base 7: mod_base = OTHER; note = 2'-deoxyadenosine-3'-phosphorothioate
  modified_base 8: mod_base = OTHER; note = 5'-methyl-deoxycytidine-3'-phosphorothioate
  modified_base 9: mod_base = OTHER; note = 5'-methyl-deoxycytidine-3'-phosphorothioate
  modified_base 10: mod_base = OTHER; note = 2'-deoxythymidine-3'-phosphorothioate
  modified_base 11: mod_base = OTHER; note = 2'-deoxyguanosine-3'-phosphorothioate
  modified_base 12: mod_base = OTHER; note = 2'-deoxyadenosine-3'-phosphorothioate
  modified_base 13: mod_base = OTHER; note = 2'-deoxyguanosine-3'-phosphorothioate
  modified_base 14: mod_base = OTHER; note = 5'-methyl-deoxycytidine-3'-phosphorothioate
  modified_base 15: mod_base = OTHER; note = 2'-deoxythymidine-3'-phosphorothioate
  modified_base 16: mod_base = OTHER; note = 2'-O-methyluridine-3'-phosphorothioate
  modified_base 17: mod_base = OTHER; note = 2'-O-methyladenosine-3'- phosphorothioate
  modified_base 18: mod_base = OTHER; note = 2'-O-methylcytidine-3'- phosphorothioate
  modified_base 19: mod_base = OTHER; note = 2'-O-methyladenosine-3'- phosphorothioate
  modified_base 20: mod_base = OTHER; note = 2'-O-methyladenosine-3'-phosphate
  misc_feature 1..5: note = RNA
  misc_feature 6..15: note = DNA
  misc_feature 16..20: note = RNA
ctttgaacctgagcttacaa

SEQ ID NO: 4295 - DNA, 20 bp, synthetic construct
  source 1..20: mol_type = other DNA
  modified_base 1: mod_base = OTHER; note = 2'-O-methyladenosine-3'- phosphorothioate
  modified_base 2: mod_base = OTHER; note = 2'-O-methyluridine-3'-phosphorothioate
  modified_base 3: mod_base = OTHER; note = 2'-O-methyluridine-3'-phosphorothioate
  modified_base 4: mod_base = OTHER; note = 2'-O-methyladenosine-3'- phosphorothioate
  modified_base 5: mod_base = OTHER; note = 2'-O-methylcytidine-3'- phosphorothioate
  modified_base 6: mod_base = OTHER; note = 5'-methyl-deoxycytidine-3'-phosphorothioate
  modified_base 7: mod_base = OTHER; note = 2'-deoxyadenosine-3'-phosphorothioate
  modified_base 8: mod_base = OTHER; note = 2'-deoxyadenosine-3'-phosphorothioate
  modified_base 9: mod_base = OTHER; note = 5'-methyl-deoxycytidine-3'-phosphorothioate
  modified_base 10: mod_base = OTHER; note = 2'-deoxyadenosine-3'-phosphorothioate
  modified_base 11: mod_base = OTHER; note = 5'-methyl-deoxycytidine-3'-phosphorothioate
  modified_base 12: mod_base = OTHER; note = 2'-deoxythymidine-3'-phosphorothioate
  modified_base 13: mod_base = OTHER; note = 2'-deoxythymidine-3'-phosphorothioate
  modified_base 14: mod_base = OTHER; note = 2'-deoxythymidine-3'-phosphorothioate
  modified_base 15: mod_base = OTHER; note = 2'-deoxyguanosine-3'-phosphorothioate
  modified_base 16: mod_base = OTHER; note = 2'-O-methyladenosine-3'- phosphorothioate
  modified_base 17: mod_base = OTHER; note = 2'-O-methyladenosine-3'- phosphorothioate
  modified_base 18: mod_base = OTHER; note = 2'-O-methylcytidine-3'- phosphorothioate
  modified_base 19: mod_base = OTHER; note = 2'-O-methylcytidine-3'- phosphorothioate
  modified_base 20: mod_base = OTHER; note = 2'-O-methyluridine-3'-phosphate
  misc_feature 1..5: note = RNA
  misc_feature 6..15: note = DNA
  misc_feature 16..20: note = RNA
attaccaacactttgaacct

SEQ ID NO: 4296 - DNA, 20 bp, synthetic construct
  source 1..20: mol_type = other DNA
  modified_base 1: mod_base = OTHER; note = 2'-O-methyluridine-3'-phosphorothioate
  modified_base 2: mod_base = OTHER; note = 2'-O-methylguanosine-3'- phosphorothioate
  modified_base 3: mod_base = OTHER; note = 2'-O-methyluridine-3'-phosphorothioate
  modified_base 4: mod_base = OTHER; note = 2'-O-methylguanosine-3'- phosphorothioate
  modified_base 5: mod_base = OTHER; note = 2'-O-methyladenosine-3'- phosphorothioate
  modified_base 6: mod_base = OTHER; note = 2'-deoxyadenosine-3'-phosphorothioate
  modified_base 7: mod_base = OTHER; note = 2'-deoxythymidine-3'-phosphorothioate
  modified_base 8: mod_base = OTHER; note = 5'-methyl-deoxycytidine-3'-phosphorothioate
  modified_base 9: mod_base = OTHER; note = 2'-deoxyadenosine-3'-phosphorothioate
  modified_base 10: mod_base = OTHER; note = 2'-deoxyguanosine-3'-phosphorothioate
  modified_base 11: mod_base = OTHER; note = 2'-deoxyguanosine-3'-phosphorothioate
  modified_base 12: mod_base = OTHER; note = 5'-methyl-deoxycytidine-3'-phosphorothioate
  modified_base 13: mod_base = OTHER; note = 2'-deoxyadenosine-3'-phosphorothioate
  modified_base 14: mod_base = OTHER; note = 2'-deoxythymidine-3'-phosphorothioate
  modified_base 15: mod_base = OTHER; note = 2'-deoxythymidine-3'-phosphorothioate
  modified_base 16: mod_base = OTHER; note = 2'-O-methyladenosine-3'- phosphorothioate
  modified_base 17: mod_base = OTHER; note = 2'-O-methylcytidine-3'- phosphorothioate
  modified_base 18: mod_base = OTHER; note = 2'-O-methylcytidine-3'- phosphorothioate
  modified_base 19: mod_base = OTHER; note = 2'-O-methyladenosine-3'- phosphorothioate
  modified_base 20: mod_base = OTHER; note = 2'-O-methyladenosine-3'-phosphate
  misc_feature 1..5: note = RNA
  misc_feature 6..15: note = DNA
  misc_feature 16..20: note = RNA
tgtgaatcaggcattaccaa

SEQ ID NO: 4297 - DNA, 20 bp, synthetic construct
  source 1..20: mol_type = other DNA
  modified_base 1: mod_base = OTHER; note = 2'-O-methyluridine-3'-phosphorothioate
  modified_base 2: mod_base = OTHER; note = 2'-O-methylcytidine-3'- phosphorothioate
  modified_base 3: mod_base = OTHER; note = 2'-O-methyluridine-3'-phosphorothioate
  modified_base 4: mod_base = OTHER; note = 2'-O-methylcytidine-3'- phosphorothioate
  modified_base 5: mod_base = OTHER; note = 2'-O-methyladenosine-3'- phosphorothioate
  modified_base 6: mod_base = OTHER; note = 2'-deoxyadenosine-3'-phosphorothioate
  modified_base 7: mod_base = OTHER; note = 2'-deoxyadenosine-3'-phosphorothioate
  modified_base 8: mod_base = OTHER; note = 2'-deoxyguanosine-3'-phosphorothioate
  modified_base 9: mod_base = OTHER; note = 2'-deoxythymidine-3'-phosphorothioate
  modified_base 10: mod_base = OTHER; note = 2'-deoxythymidine-3'-phosphorothioate
  modified_base 11: mod_base = OTHER; note = 2'-deoxyguanosine-3'-phosphorothioate
  modified_base 12: mod_base = OTHER; note = 2'-deoxythymidine-3'-phosphorothioate
  modified_base 13: mod_base = OTHER; note = 2'-deoxyguanosine-3'-phosphorothioate
  modified_base 14: mod_base = OTHER; note = 2'-deoxyadenosine-3'-phosphorothioate
  modified_base 15: mod_base = OTHER; note = 2'-deoxyadenosine-3'-phosphorothioate
  modified_base 16: mod_base = OTHER; note = 2'-O-methyluridine-3'-phosphorothioate
  modified_base 17: mod_base = OTHER; note = 2'-O-methylcytidine-3'- phosphorothioate
  modified_base 18: mod_base = OTHER; note = 2'-O-methyladenosine-3'- phosphorothioate
  modified_base 19: mod_base = OTHER; note = 2'-O-methylguanosine-3'- phosphorothioate
  modified_base 20: mod_base = OTHER; note = 2'-O-methylguanosine-3'-phosphate
  misc_feature 1..5: note = RNA
  misc_feature 6..15: note = DNA
  misc_feature 16..20: note = RNA
tctcaaagttgtgaatcagg

SEQ ID NO: 4298 - DNA, 20 bp, synthetic construct
  source 1..20: mol_type = other DNA
  modified_base 1: mod_base = OTHER; note = 2'-O-methylcytidine-3'- phosphorothioate
  modified_base 2: mod_base = OTHER; note = 2'-O-methyladenosine-3'- phosphorothioate
  modified_base 3: mod_base = OTHER; note = 2'-O-methylguanosine-3'- phosphorothioate
  modified_base 4: mod_base = OTHER; note = 2'-O-methyluridine-3'-phosphorothioate
  modified_base 5: mod_base = OTHER; note = 2'-O-methylguanosine-3'- phosphorothioate
  modified_base 6: mod_base = OTHER; note = 5'-methyl-deoxycytidine-3'-phosphorothioate
  modified_base 7: mod_base = OTHER; note = 2'-deoxythymidine-3'-phosphorothioate
  modified_base 8: mod_base = OTHER; note = 2'-deoxyadenosine-3'-phosphorothioate
  modified_base 9: mod_base = OTHER; note = 5'-methyl-deoxycytidine-3'-phosphorothioate
  modified_base 10: mod_base = OTHER; note = 5'-methyl-deoxycytidine-3'-phosphorothioate
  modified_base 11: mod_base = OTHER; note = 2'-deoxythymidine-3'-phosphorothioate
  modified_base 12: mod_base = OTHER; note = 2'-deoxythymidine-3'-phosphorothioate
  modified_base 13: mod_base = OTHER; note = 5'-methyl-deoxycytidine-3'-phosphorothioate
  modified_base 14: mod_base = OTHER; note = 2'-deoxythymidine-3'-phosphorothioate
  modified_base 15: mod_base = OTHER; note = 5'-methyl-deoxycytidine-3'-phosphorothioate
  modified_base 16: mod_base = OTHER; note = 2'-O-methyladenosine-3'- phosphorothioate
  modified_base 17: mod_base = OTHER; note = 2'-O-methyladenosine-3'- phosphorothioate
  modified_base 18: mod_base = OTHER; note = 2'-O-methyladenosine-3'- phosphorothioate
  modified_base 19: mod_base = OTHER; note = 2'-O-methylguanosine-3'- phosphorothioate
  modified_base 20: mod_base = OTHER; note = 2'-O-methyluridine-3'-phosphate
  misc_feature 1..5: note = RNA
  misc_feature 6..15: note = DNA
  misc_feature 16..20: note = RNA
cagtgctaccttctcaaagt

SEQ ID NO: 4299 - DNA, 20 bp, synthetic construct
  source 1..20: mol_type = other DNA
  modified_base 1: mod_base = OTHER; note = 2'-O-methyluridine-3'-phosphorothioate
  modified_base 2: mod_base = OTHER; note = 2'-O-methyluridine-3'-phosphorothioate
  modified_base 3: mod_base = OTHER; note = 2'-O-methylcytidine-3'- phosphorothioate
  modified_base 4: mod_base = OTHER; note = 2'-O-methylcytidine-3'- phosphorothioate
  modified_base 5: mod_base = OTHER; note = 2'-O-methyladenosine-3'- phosphorothioate
  modified_base 6: mod_base = OTHER; note = 2'-deoxyadenosine-3'-phosphorothioate
  modified_base 7: mod_base = OTHER; note = 2'-deoxythymidine-3'-phosphorothioate
  modified_base 8: mod_base = OTHER; note = 2'-deoxythymidine-3'-phosphorothioate
  modified_base 9: mod_base = OTHER; note = 5'-methyl-deoxycytidine-3'-phosphorothioate
  modified_base 10: mod_base = OTHER; note = 2'-deoxythymidine-3'-phosphorothioate
  modified_base 11: mod_base = OTHER; note = 5'-methyl-deoxycytidine-3'-phosphorothioate
  modified_base 12: mod_base = OTHER; note = 2'-deoxythymidine-3'-phosphorothioate
  modified_base 13: mod_base = OTHER; note = 5'-methyl-deoxycytidine-3'-phosphorothioate
  modified_base 14: mod_base = OTHER; note = 5'-methyl-deoxycytidine-3'-phosphorothioate
  modified_base 15: mod_base = OTHER; note = 2'-deoxyadenosine-3'-phosphorothioate
  modified_base 16: mod_base = OTHER; note = 2'-O-methylguanosine-3'- phosphorothioate
  modified_base 17: mod_base = OTHER; note = 2'-O-methyluridine-3'-phosphorothioate
  modified_base 18: mod_base = OTHER; note = 2'-O-methylguanosine-3'- phosphorothioate
  modified_base 19: mod_base = OTHER; note = 2'-O-methylcytidine-3'- phosphorothioate
  modified_base 20: mod_base = OTHER; note = 2'-O-methyluridine-3'-phosphate
  misc_feature 1..5: note = RNA
  misc_feature 6..15: note = DNA
  misc_feature 16..20: note = RNA
ttccaattctctccagtgct

SEQ ID NO: 4300 - DNA, 20 bp, synthetic construct
  source 1..20: mol_type = other DNA
  modified_base 1: mod_base = OTHER; note = 2'-O-methylcytidine-3'- phosphorothioate
  modified_base 2: mod_base = OTHER; note = 2'-O-methylcytidine-3'- phosphorothioate
  modified_base 3: mod_base = OTHER; note = 2'-O-methylguanosine-3'- phosphorothioate
  modified_base 4: mod_base = OTHER; note = 2'-O-methylcytidine-3'- phosphorothioate
  modified_base 5: mod_base = OTHER; note = 2'-O-methylcytidine-3'- phosphorothioate
  modified_base 6: mod_base = OTHER; note = 2'-deoxyadenosine-3'-phosphorothioate
  modified_base 7: mod_base = OTHER; note = 5'-methyl-deoxycytidine-3'-phosphorothioate
  modified_base 8: mod_base = OTHER; note = 5'-methyl-deoxycytidine-3'-phosphorothioate
  modified_base 9: mod_base = OTHER; note = 5'-methyl-deoxycytidine-3'-phosphorothioate
  modified_base 10: mod_base = OTHER; note = 2'-deoxyadenosine-3'-phosphorothioate
  modified_base 11: mod_base = OTHER; note = 2'-deoxythymidine-3'-phosphorothioate
  modified_base 12: mod_base = OTHER; note = 2'-deoxythymidine-3'-phosphorothioate
  modified_base 13: mod_base = OTHER; note = 5'-methyl-deoxycytidine-3'-phosphorothioate
  modified_base 14: mod_base = OTHER; note = 5'-methyl-deoxycytidine-3'-phosphorothioate
  modified_base 15: mod_base = OTHER; note = 2'-deoxyadenosine-3'-phosphorothioate
  modified_base 16: mod_base = OTHER; note = 2'-O-methyladenosine-3'- phosphorothioate
  modified_base 17: mod_base = OTHER; note = 2'-O-methyluridine-3'-phosphorothioate
  modified_base 18: mod_base = OTHER; note = 2'-O-methyluridine-3'-phosphorothioate
  modified_base 19: mod_base = OTHER; note = 2'-O-methylcytidine-3'- phosphorothioate
  modified_base 20: mod_base = OTHER; note = 2'-O-methyluridine-3'-phosphate
  misc_feature 1..5: note = RNA
  misc_feature 6..15: note = DNA
  misc_feature 16..20: note = RNA
ccgccacccattccaattct

SEQ ID NO: 4301 - DNA, 20 bp, synthetic construct
  source 1..20: mol_type = other DNA
  modified_base 1: mod_base = OTHER; note = 2'-O-methyluridine-3'-phosphorothioate
  modified_base 2: mod_base = OTHER; note = 2'-O-methylcytidine-3'- phosphorothioate
  modified_base 3: mod_base = OTHER; note = 2'-O-methyladenosine-3'- phosphorothioate
  modified_base 4: mod_base = OTHER; note = 2'-O-methylcytidine-3'- phosphorothioate
  modified_base 5: mod_base = OTHER; note = 2'-O-methylcytidine-3'- phosphorothioate
  modified_base 6: mod_base = OTHER; note = 2'-deoxyadenosine-3'-phosphorothioate
  modified_base 7: mod_base = OTHER; note = 2'-deoxyadenosine-3'-phosphorothioate
  modified_base 8: mod_base = OTHER; note = 2'-deoxythymidine-3'-phosphorothioate
  modified_base 9: mod_base = OTHER; note = 2'-deoxythymidine-3'-phosphorothioate
  modified_base 10: mod_base = OTHER; note = 2'-deoxyadenosine-3'-phosphorothioate
  modified_base 11: mod_base = OTHER; note = 5'-methyl-deoxycytidine-3'-phosphorothioate
  modified_base 12: mod_base = OTHER; note = 5'-methyl-deoxycytidine-3'-phosphorothioate
  modified_base 13: mod_base = OTHER; note = 2'-deoxyguanosine-3'-phosphorothioate
  modified_base 14: mod_base = OTHER; note = 5'-methyl-deoxycytidine-3'-phosphorothioate
  modified_base 15: mod_base = OTHER; note = 5'-methyl-deoxycytidine-3'-phosphorothioate
  modified_base 16: mod_base = OTHER; note = 2'-O-methyladenosine-3'- phosphorothioate
  modified_base 17: mod_base = OTHER; note = 2'-O-methylcytidine-3'- phosphorothioate
  modified_base 18: mod_base = OTHER; note = 2'-O-methylcytidine-3'- phosphorothioate
  modified_base 19: mod_base = OTHER; note = 2'-O-methylcytidine-3'- phosphorothioate
  modified_base 20: mod_base = OTHER; note = 2'-O-methyladenosine-3'-phosphate
  misc_feature 1..5: note = RNA
  misc_feature 6..15: note = DNA
  misc_feature 16..20: note = RNA
tcaccaattaccgccaccca

SEQ ID NO: 4302 - DNA, 20 bp, synthetic construct
  source 1..20: mol_type = other DNA
  modified_base 1: mod_base = OTHER; note = 2'-O-methyladenosine-3'- phosphorothioate
  modified_base 2: mod_base = OTHER; note = 2'-O-methyluridine-3'-phosphorothioate
  modified_base 3: mod_base = OTHER; note = 2'-O-methyluridine-3'-phosphorothioate
  modified_base 4: mod_base = OTHER; note = 2'-O-methylcytidine-3'- phosphorothioate
  modified_base 5: mod_base = OTHER; note = 2'-O-methyladenosine-3'- phosphorothioate
  modified_base 6: mod_base = OTHER; note = 2'-deoxyadenosine-3'-phosphorothioate
  modified_base 7: mod_base = OTHER; note = 2'-deoxyadenosine-3'-phosphorothioate
  modified_base 8: mod_base = OTHER; note = 2'-deoxyguanosine-3'-phosphorothioate
  modified_base 9: mod_base = OTHER; note = 2'-deoxyadenosine-3'-phosphorothioate
  modified_base 10: mod_base = OTHER; note = 2'-deoxyadenosine-3'-phosphorothioate
  modified_base 11: mod_base = OTHER; note = 2'-deoxyguanosine-3'-phosphorothioate
  modified_base 12: mod_base = OTHER; note = 2'-deoxythymidine-3'-phosphorothioate
  modified_base 13: mod_base = OTHER; note = 2'-deoxyadenosine-3'-phosphorothioate
  modified_base 14: mod_base = OTHER; note = 2'-deoxythymidine-3'-phosphorothioate
  modified_base 15: mod_base = OTHER; note = 5'-methyl-deoxycytidine-3'-phosphorothioate
  modified_base 16: mod_base = OTHER; note = 2'-O-methyladenosine-3'- phosphorothioate
  modified_base 17: mod_base = OTHER; note = 2'-O-methylcytidine-3'- phosphorothioate
  modified_base 18: mod_base = OTHER; note = 2'-O-methylcytidine-3'- phosphorothioate
  modified_base 19: mod_base = OTHER; note = 2'-O-methyladenosine-3'- phosphorothioate
  modified_base 20: mod_base = OTHER; note = 2'-O-methyladenosine-3'-phosphate
  misc_feature 1..5: note = RNA
  misc_feature 6..15: note = DNA
  misc_feature 16..20: note = RNA
attcaaagaagtatcaccaa

SEQ ID NO: 4303 - DNA, 20 bp, synthetic construct
  source 1..20: mol_type = other DNA
  modified_base 1: mod_base = OTHER; note = 2'-O-methyluridine-3'-phosphorothioate
  modified_base 2: mod_base = OTHER; note = 2'-O-methylguanosine-3'- phosphorothioate
  modified_base 3: mod_base = OTHER; note = 2'-O-methylguanosine-3'- phosphorothioate
  modified_base 4: mod_base = OTHER; note = 2'-O-methyladenosine-3'- phosphorothioate
  modified_base 5: mod_base = OTHER; note = 2'-O-methyladenosine-3'- phosphorothioate
  modified_base 6: mod_base = OTHER; note = 2'-deoxyadenosine-3'-phosphorothioate
  modified_base 7: mod_base = OTHER; note = 2'-deoxythymidine-3'-phosphorothioate
  modified_base 8: mod_base = OTHER; note = 5'-methyl-deoxycytidine-3'-phosphorothioate
  modified_base 9: mod_base = OTHER; note = 2'-deoxythymidine-3'-phosphorothioate
  modified_base 10: mod_base = OTHER; note = 2'-deoxyadenosine-3'-phosphorothioate
  modified_base 11: mod_base = OTHER; note = 5'-methyl-deoxycytidine-3'-phosphorothioate
  modified_base 12: mod_base = OTHER; note = 2'-deoxyadenosine-3'-phosphorothioate
  modified_base 13: mod_base = OTHER; note = 2'-deoxythymidine-3'-phosphorothioate
  modified_base 14: mod_base = OTHER; note = 2'-deoxythymidine-3'-phosphorothioate
  modified_base 15: mod_base = OTHER; note = 5'-methyl-deoxycytidine-3'-phosphorothioate
  modified_base 16: mod_base = OTHER; note = 2'-O-methyladenosine-3'- phosphorothioate
  modified_base 17: mod_base = OTHER; note = 2'-O-methyladenosine-3'- phosphorothioate
  modified_base 18: mod_base = OTHER; note = 2'-O-methyladenosine-3'- phosphorothioate
  modified_base 19: mod_base = OTHER; note = 2'-O-methylguanosine-3'- phosphorothioate
  modified_base 20: mod_base = OTHER; note = 2'-O-methyladenosine-3'-phosphate
  misc_feature 1..5: note = RNA
  misc_feature 6..15: note = DNA
  misc_feature 16..20: note = RNA
tggaaatctacattcaaaga

SEQ ID NO: 4304 - DNA, 20 bp, synthetic construct
  source 1..20: mol_type = other DNA
  modified_base 1: mod_base = OTHER; note = 2'-O-methyladenosine-3'- phosphorothioate
  modified_base 2: mod_base = OTHER; note = 2'-O-methyladenosine-3'- phosphorothioate
  modified_base 3: mod_base = OTHER; note = 2'-O-methylguanosine-3'- phosphorothioate
  modified_base 4: mod_base = OTHER; note = 2'-O-methyladenosine-3'- phosphorothioate
  modified_base 5: mod_base = OTHER; note = 2'-O-methyluridine-3'-phosphorothioate
  modified_base 6: mod_base = OTHER; note = 2'-deoxyguanosine-3'-phosphorothioate
  modified_base 7: mod_base = OTHER; note = 2'-deoxythymidine-3'-phosphorothioate
  modified_base 8: mod_base = OTHER; note = 2'-deoxyguanosine-3'-phosphorothioate
  modified_base 9: mod_base = OTHER; note = 2'-deoxyadenosine-3'-phosphorothioate
  modified_base 10: mod_base = OTHER; note = 2'-deoxythymidine-3'-phosphorothioate
  modified_base 11: mod_base = OTHER; note = 2'-deoxythymidine-3'-phosphorothioate
  modified_base 12: mod_base = OTHER; note = 2'-deoxyguanosine-3'-phosphorothioate
  modified_base 13: mod_base = OTHER; note = 2'-deoxyguanosine-3'-phosphorothioate
  modified_base 14: mod_base = OTHER; note = 2'-deoxyadenosine-3'-phosphorothioate
  modified_base 15: mod_base = OTHER; note = 2'-deoxyadenosine-3'-phosphorothioate
  modified_base 16: mod_base = OTHER; note = 2'-O-methyladenosine-3'- phosphorothioate
  modified_base 17: mod_base = OTHER; note = 2'-O-methyluridine-3'-phosphorothioate
  modified_base 18: mod_base = OTHER; note = 2'-O-methylcytidine-3'- phosphorothioate
  modified_base 19: mod_base = OTHER; note = 2'-O-methyluridine-3'-phosphorothioate
  modified_base 20: mod_base = OTHER; note = 2'-O-methyladenosine-3'-phosphate
  misc_feature 1..5: note = RNA
  misc_feature 6..15: note = DNA
  misc_feature 16..20: note = RNA
aagatgtgattggaaatcta

SEQ ID NO: 4305 - DNA, 20 bp, synthetic construct
  source 1..20: mol_type = other DNA
  modified_base 1: mod_base = OTHER; note = 2'-O-methyluridine-3'-phosphorothioate
  modified_base 2: mod_base = OTHER; note = 2'-O-methyluridine-3'-phosphorothioate
  modified_base 3: mod_base = OTHER; note = 2'-O-methylcytidine-3'- phosphorothioate
  modified_base 4: mod_base = OTHER; note = 2'-O-methyladenosine-3'- phosphorothioate
  modified_base 5: mod_base = OTHER; note = 2'-O-methylguanosine-3'- phosphorothioate
  modified_base 6: mod_base = OTHER; note = 2'-deoxyadenosine-3'-phosphorothioate
  modified_base 7: mod_base = OTHER; note = 5'-methyl-deoxycytidine-3'-phosphorothioate
  modified_base 8: mod_base = OTHER; note = 2'-deoxyadenosine-3'-phosphorothioate
  modified_base 9: mod_base = OTHER; note = 5'-methyl-deoxycytidine-3'-phosphorothioate
  modified_base 10: mod_base = OTHER; note = 2'-deoxythymidine-3'-phosphorothioate
  modified_base 11: mod_base = OTHER; note = 2'-deoxyadenosine-3'-phosphorothioate
  modified_base 12: mod_base = OTHER; note = 2'-deoxyadenosine-3'-phosphorothioate
  modified_base 13: mod_base = OTHER; note = 2'-deoxyadenosine-3'-phosphorothioate
  modified_base 14: mod_base = OTHER; note = 2'-deoxyguanosine-3'-phosphorothioate
  modified_base 15: mod_base = OTHER; note = 2'-deoxyadenosine-3'-phosphorothioate
  modified_base 16: mod_base = OTHER; note = 2'-O-methyluridine-3'-phosphorothioate
  modified_base 17: mod_base = OTHER; note = 2'-O-methylguanosine-3'- phosphorothioate
  modified_base 18: mod_base = OTHER; note = 2'-O-methyluridine-3'-phosphorothioate
  modified_base 19: mod_base = OTHER; note = 2'-O-methylguanosine-3'- phosphorothioate
  modified_base 20: mod_base = OTHER; note = 2'-O-methyladenosine-3'-phosphate
  misc_feature 1..5: note = RNA
  misc_feature 6..15: note = DNA
  misc_feature 16..20: note = RNA
ttcagacactaaagatgtga

SEQ ID NO: 4306 - DNA, 20 bp, synthetic construct
  source 1..20: mol_type = other DNA
  modified_base 1: mod_base = OTHER; note = 2'-O-methylcytidine-3'- phosphorothioate
  modified_base 2: mod_base = OTHER; note = 2'-O-methyladenosine-3'- phosphorothioate
  modified_base 3: mod_base = OTHER; note = 2'-O-methyluridine-3'-phosphorothioate
  modified_base 4: mod_base = OTHER; note = 2'-O-methyluridine-3'-phosphorothioate
  modified_base 5: mod_base = OTHER; note = 2'-O-methyluridine-3'-phosphorothioate
  modified_base 6: mod_base = OTHER; note = 2'-deoxyguanosine-3'-phosphorothioate
  modified_base 7: mod_base = OTHER; note = 2'-deoxyguanosine-3'-phosphorothioate
  modified_base 8: mod_base = OTHER; note = 2'-deoxyadenosine-3'-phosphorothioate
  modified_base 9: mod_base = OTHER; note = 2'-deoxythymidine-3'-phosphorothioate
  modified_base 10: mod_base = OTHER; note = 2'-deoxyadenosine-3'-phosphorothioate
  modified_base 11: mod_base = OTHER; note = 2'-deoxythymidine-3'-phosphorothioate
  modified_base 12: mod_base = OTHER; note = 2'-deoxyadenosine-3'-phosphorothioate
  modified_base 13: mod_base = OTHER; note = 2'-deoxythymidine-3'-phosphorothioate
  modified_base 14: mod_base = OTHER; note = 2'-deoxythymidine-3'-phosphorothioate
  modified_base 15: mod_base = OTHER; note = 5'-methyl-deoxycytidine-3'-phosphorothioate
  modified_base 16: mod_base = OTHER; note = 2'-O-methyladenosine-3'- phosphorothioate
  modified_base 17: mod_base = OTHER; note = 2'-O-methylguanosine-3'- phosphorothioate
  modified_base 18: mod_base = OTHER; note = 2'-O-methyladenosine-3'- phosphorothioate
  modified_base 19: mod_base = OTHER; note = 2'-O-methylcytidine-3'- phosphorothioate
  modified_base 20: mod_base = OTHER; note = 2'-O-methyladenosine-3'-phosphate
  misc_feature 1..5: note = RNA
  misc_feature 6..15: note = DNA
  misc_feature 16..20: note = RNA
catttggatatattcagaca

SEQ ID NO: 4307 - DNA, 20 bp, synthetic construct
  source 1..20: mol_type = other DNA
  modified_base 1: mod_base = OTHER; note = 2'-O-methylcytidine-3'- phosphorothioate
  modified_base 2: mod_base = OTHER; note = 2'-O-methyladenosine-3'- phosphorothioate
  modified_base 3: mod_base = OTHER; note = 2'-O-methyluridine-3'-phosphorothioate
  modified_base 4: mod_base = OTHER; note = 2'-O-methylcytidine-3'- phosphorothioate
  modified_base 5: mod_base = OTHER; note = 2'-O-methylcytidine-3'- phosphorothioate
  modified_base 6: mod_base = OTHER; note = 2'-deoxythymidine-3'-phosphorothioate
  modified_base 7: mod_base = OTHER; note = 2'-deoxyadenosine-3'-phosphorothioate
  modified_base 8: mod_base = OTHER; note = 2'-deoxyadenosine-3'-phosphorothioate
  modified_base 9: mod_base = OTHER; note = 2'-deoxyadenosine-3'-phosphorothioate
  modified_base 10: mod_base = OTHER; note = 2'-deoxyadenosine-3'-phosphorothioate
  modified_base 11: mod_base = OTHER; note = 5'-methyl-deoxycytidine-3'-phosphorothioate
  modified_base 12: mod_base = OTHER; note = 2'-deoxyadenosine-3'-phosphorothioate
  modified_base 13: mod_base = OTHER; note = 2'-deoxythymidine-3'-phosphorothioate
  modified_base 14: mod_base = OTHER; note = 2'-deoxythymidine-3'-phosphorothioate
  modified_base 15: mod_base = OTHER; note = 2'-deoxythymidine-3'-phosphorothioate
  modified_base 16: mod_base = OTHER; note = 2'-O-methylguanosine-3'- phosphorothioate
  modified_base 17: mod_base = OTHER; note = 2'-O-methylguanosine-3'- phosphorothioate
  modified_base 18: mod_base = OTHER; note = 2'-O-methyladenosine-3'- phosphorothioate
  modified_base 19: mod_base = OTHER; note = 2'-O-methyluridine-3'-phosphorothioate
  modified_base 20: mod_base = OTHER; note = 2'-O-methyladenosine-3'-phosphate
  misc_feature 1..5: note = RNA
  misc_feature 6..15: note = DNA
  misc_feature 16..20: note = RNA
catcctaaaacatttggata

SEQ ID NO: 4308 - DNA, 20 bp, synthetic construct
  source 1..20: mol_type = other DNA
  modified_base 1: mod_base = OTHER; note = 2'-O-methyladenosine-3'- phosphorothioate
  modified_base 2: mod_base = OTHER; note = 2'-O-methyladenosine-3'- phosphorothioate
  modified_base 3: mod_base = OTHER; note = 2'-O-methylguanosine-3'- phosphorothioate
  modified_base 4: mod_base = OTHER; note = 2'-O-methyluridine-3'-phosphorothioate
  modified_base 5: mod_base = OTHER; note = 2'-O-methyladenosine-3'- phosphorothioate
  modified_base 6: mod_base = OTHER; note = 2'-deoxyadenosine-3'-phosphorothioate
  modified_base 7: mod_base = OTHER; note = 5'-methyl-deoxycytidine-3'-phosphorothioate
  modified_base 8: mod_base = OTHER; note = 2'-deoxyadenosine-3'-phosphorothioate
  modified_base 9: mod_base = OTHER; note = 2'-deoxythymidine-3'-phosphorothioate
  modified_base 10: mod_base = OTHER; note = 2'-deoxyadenosine-3'-phosphorothioate
  modified_base 11: mod_base = OTHER; note = 5'-methyl-deoxycytidine-3'-phosphorothioate
  modified_base 12: mod_base = OTHER; note = 2'-deoxyadenosine-3'-phosphorothioate
  modified_base 13: mod_base = OTHER; note = 2'-deoxythymidine-3'-phosphorothioate
  modified_base 14: mod_base = OTHER; note = 5'-methyl-deoxycytidine-3'-phosphorothioate
  modified_base 15: mod_base = OTHER; note = 5'-methyl-deoxycytidine-3'-phosphorothioate
  modified_base 16: mod_base = OTHER; note = 2'-O-methyluridine-3'-phosphorothioate
  modified_base 17: mod_base = OTHER; note = 2'-O-methyladenosine-3'- phosphorothioate
  modified_base 18: mod_base = OTHER; note = 2'-O-methyladenosine-3'- phosphorothioate
  modified_base 19: mod_base = OTHER; note = 2'-O-methyladenosine-3'- phosphorothioate
  modified_base 20: mod_base = OTHER; note = 2'-O-methyladenosine-3'-phosphate
  misc_feature 1..5: note = RNA
  misc_feature 6..15: note = DNA
  misc_feature 16..20: note = RNA
aagtaacatacatcctaaaa

SEQ ID NO: 4309 - DNA, 20 bp, synthetic construct
  source 1..20: mol_type = other DNA
  modified_base 1: mod_base = OTHER; note = 2'-O-methyluridine-3'-phosphorothioate
  modified_base 2: mod_base = OTHER; note = 2'-O-methyluridine-3'-phosphorothioate
  modified_base 3: mod_base = OTHER; note = 2'-O-methyluridine-3'-phosphorothioate
  modified_base 4: mod_base = OTHER; note = 2'-O-methylcytidine-3'- phosphorothioate
  modified_base 5: mod_base = OTHER; note = 2'-O-methyluridine-3'-phosphorothioate
  modified_base 6: mod_base = OTHER; note = 5'-methyl-deoxycytidine-3'-phosphorothioate
  modified_base 7: mod_base = OTHER; note = 2'-deoxythymidine-3'-phosphorothioate
  modified_base 8: mod_base = OTHER; note = 5'-methyl-deoxycytidine-3'-phosphorothioate
  modified_base 9: mod_base = OTHER; note = 2'-deoxythymidine-3'-phosphorothioate
  modified_base 10: mod_base = OTHER; note = 2'-deoxyadenosine-3'-phosphorothioate
  modified_base 11: mod_base = OTHER; note = 2'-deoxyadenosine-3'-phosphorothioate
  modified_base 12: mod_base = OTHER; note = 2'-deoxyguanosine-3'-phosphorothioate
  modified_base 13: mod_base = OTHER; note = 2'-deoxyadenosine-3'-phosphorothioate
  modified_base 14: mod_base = OTHER; note = 2'-deoxyadenosine-3'-phosphorothioate
  modified_base 15: mod_base = OTHER; note = 2'-deoxyguanosine-3'-phosphorothioate
  modified_base 16: mod_base = OTHER; note = 2'-O-methyluridine-3'-phosphorothioate
  modified_base 17: mod_base = OTHER; note = 2'-O-methyladenosine-3'- phosphorothioate
  modified_base 18: mod_base = OTHER; note = 2'-O-methyladenosine-3'- phosphorothioate
  modified_base 19: mod_base = OTHER; note = 2'-O-methylcytidine-3'- phosphorothioate
  modified_base 20: mod_base = OTHER; note = 2'-O-methyladenosine-3'-phosphate
  misc_feature 1..5: note = RNA
  misc_feature 6..15: note = DNA
  misc_feature 16..20: note = RNA
tttctctctaagaagtaaca

SEQ ID NO: 4310 - DNA, 20 bp, synthetic construct
  source 1..20: mol_type = other DNA
  modified_base 1: mod_base = OTHER; note = 2'-O-methyladenosine-3'- phosphorothioate
  modified_base 2: mod_base = OTHER; note = 2'-O-methyladenosine-3'- phosphorothioate
  modified_base 3: mod_base = OTHER; note = 2'-O-methyladenosine-3'- phosphorothioate
  modified_base 4: mod_base = OTHER; note = 2'-O-methyluridine-3'-phosphorothioate
  modified_base 5: mod_base = OTHER; note = 2'-O-methylguanosine-3'- phosphorothioate
  modified_base 6: mod_base = OTHER; note = 5'-methyl-deoxycytidine-3'-phosphorothioate
  modified_base 7: mod_base = OTHER; note = 2'-deoxythymidine-3'-phosphorothioate
  modified_base 8: mod_base = OTHER; note = 2'-deoxythymidine-3'-phosphorothioate
  modified_base 9: mod_base = OTHER; note = 2'-deoxythymidine-3'-phosphorothioate
  modified_base 10: mod_base = OTHER; note = 2'-deoxyadenosine-3'-phosphorothioate
  modified_base 11: mod_base = OTHER; note = 2'-deoxythymidine-3'-phosphorothioate
  modified_base 12: mod_base = OTHER; note = 2'-deoxythymidine-3'-phosphorothioate
  modified_base 13: mod_base = OTHER; note = 2'-deoxythymidine-3'-phosphorothioate
  modified_base 14: mod_base = OTHER; note = 5'-methyl-deoxycytidine-3'-phosphorothioate
  modified_base 15: mod_base = OTHER; note = 2'-deoxythymidine-3'-phosphorothioate
  modified_base 16: mod_base = OTHER; note = 2'-O-methylcytidine-3'- phosphorothioate
  modified_base 17: mod_base = OTHER; note = 2'-O-methyluridine-3'-phosphorothioate
  modified_base 18: mod_base = OTHER; note = 2'-O-methylcytidine-3'- phosphorothioate
  modified_base 19: mod_base = OTHER; note = 2'-O-methyluridine-3'-phosphorothioate
  modified_base 20: mod_base = OTHER; note = 2'-O-methyladenosine-3'-phosphate
  misc_feature 1..5: note = RNA
  misc_feature 6..15: note = DNA
  misc_feature 16..20: note = RNA
aaatgctttatttctctcta

SEQ ID NO: 4311 - RNA, 21 nt, synthetic construct
  source 1..21: mol_type = other RNA
  modified_base 1: mod_base = OTHER; note = 2'-fluorocytidine-3'-phosphorothioate
  modified_base 2: mod_base = OTHER; note = 2'-O-methyluridine-3'-phosphorothioate
  modified_base 3: mod_base = OTHER; note = 2'-fluorouridine-3'-phosphate
  modified_base 4: mod_base = OTHER; note = 2'-O-methyluridine-3'-phosphate
  modified_base 5: mod_base = OTHER; note = 2'-fluorouridine-3'-phosphate
  modified_base 6: mod_base = OTHER; note = 2'-O-methylcytidine-3'-phosphate
  modified_base 7: mod_base = OTHER; note = 2'-fluoroadenosine-3'-phosphate
  modified_base 8: mod_base = OTHER; note = 2'-O-methyladenosine-3'-phosphate
  modified_base 9: mod_base = OTHER; note = 2'-fluorouridine-3'-phosphate
  modified_base 10: mod_base = OTHER; note = 2'-fluoroguanosine-3'-phosphate
  modified_base 11: mod_base = OTHER; note = 2'-fluoroguanosine-3'-phosphate
  modified_base 12: mod_base = OTHER; note = 2'-O-methylguanosine-3'-phosphate
  modified_base 13: mod_base = OTHER; note = 2'-fluorouridine-3'-phosphate
  modified_base 14: mod_base = OTHER; note = 2'-O-methylguanosine-3'-phosphate
  modified_base 15: mod_base = OTHER; note = 2'-fluorouridine-3'-phosphate
  modified_base 16: mod_base = OTHER; note = 2'-O-methylcytidine-3'-phosphate
  modified_base 17: mod_base = OTHER; note = 2'-fluorocytidine-3'-phosphate
  modified_base 18: mod_base = OTHER; note = 2'-O-methyluridine-3'-phosphate
  modified_base 19: mod_base = OTHER; note = 2'-fluoroadenosine-3'-phosphate
  modified_base 20: mod_base = OTHER; note = 2'-O-methylguanosine-3'-phosphate
  modified_base 21: mod_base = OTHER; note 2'-fluoroadenosine-3'-phosphate-N-[tris(GalNAc-alkyl)-amido decanoyl)]-4-hydroxyprolinol (Hyp-(GalNAc-alkyl)3)
cttttcaatgggtgtcctaga

SEQ ID NO: 4312 - RNA, 21 nt, synthetic construct
  source 1..21: mol_type = other RNA
  modified_base 1: mod_base = OTHER; note = 2'-fluorouridine -3'-phosphorothioate
  modified_base 2: mod_base = OTHER; note = 2'-O-methylcytidine-3'- phosphorothioate
  modified_base 3: mod_base = OTHER; note = 2'-fluoroadenosine-3'-phosphate
  modified_base 4: mod_base = OTHER; note = 2'-O-methyladenosine-3'-phosphate
  modified_base 5: mod_base = OTHER; note = 2'-fluorouridine-3'-phosphate
  modified_base 6: mod_base = OTHER; note = 2'-O-methylguanosine-3'-phosphate
  modified_base 7: mod_base = OTHER; note = 2'-fluoroguanosine-3'-phosphate
  modified_base 8: mod_base = OTHER; note = 2'-O-methylguanosine-3'-phosphate
  modified_base 9: mod_base = OTHER; note = 2'-fluorouridine-3'-phosphate
  modified_base 10: mod_base = OTHER; note = 2'-fluoroguanosine-3'-phosphate
  modified_base 11: mod_base = OTHER; note = 2'-fluorouridine-3'-phosphate
  modified_base 12: mod_base = OTHER; note = 2'-O-methylcytidine-3'-phosphate
  modified_base 13: mod_base = OTHER; note = 2'-fluorocytidine-3'-phosphate
  modified_base 14: mod_base = OTHER; note = 2'-O-methyluridine-3'-phosphate
  modified_base 15: mod_base = OTHER; note = 2'-fluoroadenosine-3'-phosphate
  modified_base 16: mod_base = OTHER; note = 2'-O-methylguanosine-3'-phosphate
  modified_base 17: mod_base = OTHER; note = 2'-fluoroguanosine-3'-phosphate
  modified_base 18: mod_base = OTHER; note = 2'-O-methyladenosine-3'-phosphate
  modified_base 19: mod_base = OTHER; note = 2'-fluoroadenosine-3'-phosphate
  modified_base 20: mod_base = OTHER; note = 2'-O-methylcytidine-3'-phosphate
  modified_base 21: mod_base = OTHER; note 2'-fluoroadenosine-3'-phosphate-N-[tris(GalNAc-alkyl)-amido decanoyl)]-4-hydroxyprolinol (Hyp-(GalNAc-alkyl)3)
tcaatgggtgtcctaggaaca

SEQ ID NO: 4313 - RNA, 21 nt, synthetic construct
  source 1..21: mol_type = other RNA
  modified_base 1: mod_base = OTHER; note = 2'-fluorouridine -3'-phosphorothioate
  modified_base 2: mod_base = OTHER; note = 2'-O-methyluridine-3'-phosphorothioate
  modified_base 3: mod_base = OTHER; note = 2'-fluoroguanosine-3'-phosphate
  modified_base 4: mod_base = OTHER; note = 2'-O-methyladenosine-3'-phosphate
  modified_base 5: mod_base = OTHER; note = 2'-fluorocytidine-3'-phosphate
  modified_base 6: mod_base = OTHER; note = 2'-O-methyluridine-3'-phosphate
  modified_base 7: mod_base = OTHER; note = 2'-fluorouridine-3'-phosphate
  modified_base 8: mod_base = OTHER; note = 2'-O-methyluridine-3'-phosphate
  modified_base 9: mod_base = OTHER; note = 2'-fluorouridine-3'-phosphate
  modified_base 10: mod_base = OTHER; note = 2'-fluorocytidine-3'-phosphate
  modified_base 11: mod_base = OTHER; note = 2'-fluoroadenosine-3'-phosphate
  modified_base 12: mod_base = OTHER; note = 2'-O-methyladenosine-3'-phosphate
  modified_base 13: mod_base = OTHER; note = 2'-fluorouridine-3'-phosphate
  modified_base 14: mod_base = OTHER; note = 2'-O-methylguanosine-3'-phosphate
  modified_base 15: mod_base = OTHER; note = 2'-fluoroguanosine-3'-phosphate
  modified_base 16: mod_base = OTHER; note = 2'-O-methylguanosine-3'-phosphate
  modified_base 17: mod_base = OTHER; note = 2'-fluorouridine-3'-phosphate
  modified_base 18: mod_base = OTHER; note = 2'-O-methylguanosine-3'-phosphate
  modified_base 19: mod_base = OTHER; note = 2'-fluorouridine-3'-phosphate
  modified_base 20: mod_base = OTHER; note = 2'-O-methylcytidine-3'-phosphate
  modified_base 21: mod_base = OTHER; note 2'-fluoroadenosine-3'-phosphate-N-[tris(GalNAc-alkyl)-amido decanoyl)]-4-hydroxyprolinol (Hyp-(GalNAc-alkyl)3)
ttgacttttcaatgggtgtca

SEQ ID NO: 4314 - RNA, 21 nt, synthetic construct
  source 1..21: mol_type = other RNA
  modified_base 1: mod_base = OTHER; note = 2'-fluoroadenosine-3'-phosphorothioate
  modified_base 2: mod_base = OTHER; note = 2'-O-methyladenosine-3'- phosphorothioate
  modified_base 3: mod_base = OTHER; note = 2'-fluoroadenosine-3'-phosphate
  modified_base 4: mod_base = OTHER; note = 2'-O-methylguanosine-3'-phosphate
  modified_base 5: mod_base = OTHER; note = 2'-fluorouridine-3'-phosphate
  modified_base 6: mod_base = OTHER; note = 2'-O-methylcytidine-3'-phosphate
  modified_base 7: mod_base = OTHER; note = 2'-fluoroadenosine-3'-phosphate
  modified_base 8: mod_base = OTHER; note = 2'-O-methyluridine-3'-phosphate
  modified_base 9: mod_base = OTHER; note = 2'-fluorocytidine-3'-phosphate
  modified_base 10: mod_base = OTHER; note = 2'-fluoroguanosine-3'-phosphate
  modified_base 11: mod_base = OTHER; note = 2'-fluoroadenosine-3'-phosphate
  modified_base 12: mod_base = OTHER; note = 2'-O-methylcytidine-3'-phosphate
  modified_base 13: mod_base = OTHER; note = 2'-fluoroadenosine-3'-phosphate
  modified_base 14: mod_base = OTHER; note = 2'-O-methyladenosine-3'-phosphate
  modified_base 15: mod_base = OTHER; note = 2'-fluoroguanosine-3'-phosphate
  modified_base 16: mod_base = OTHER; note = 2'-O-methyladenosine-3'-phosphate
  modified_base 17: mod_base = OTHER; note = 2'-fluorocytidine-3'-phosphate
  modified_base 18: mod_base = OTHER; note = 2'-O-methyladenosine-3'-phosphate
  modified_base 19: mod_base = OTHER; note = 2'-fluorouridine-3'-phosphate
  modified_base 20: mod_base = OTHER; note = 2'-O-methyluridine-3'-phosphate
  modified_base 21: mod_base = OTHER; note 2'-fluoroadenosine-3'-phosphate-N-[tris(GalNAc-alkyl)-amido decanoyl)]-4-hydroxyprolinol (Hyp-(GalNAc-alkyl)3)
aaagtcatcgacaagacatta

SEQ ID NO: 4315 - RNA, 21 nt, synthetic construct
  source 1..21: mol_type = other RNA
  modified_base 1: mod_base = OTHER; note = 2'-fluorocytidine-3'-phosphorothioate
  modified_base 2: mod_base = OTHER; note = 2'-O-methyladenosine-3'- phosphorothioate
  modified_base 3: mod_base = OTHER; note = 2'-fluoroguanosine-3'-phosphate
  modified_base 4: mod_base = OTHER; note = 2'-O-methylguanosine-3'-phosphate
  modified_base 5: mod_base = OTHER; note = 2'-fluoroguanosine-3'-phosphate
  modified_base 6: mod_base = OTHER; note = 2'-O-methylguanosine-3'-phosphate
  modified_base 7: mod_base = OTHER; note = 2'-fluoroguanosine-3'-phosphate
  modified_base 8: mod_base = OTHER; note = 2'-O-methyladenosine-3'-phosphate
  modified_base 9: mod_base = OTHER; note = 2'-fluoroguanosine-3'-phosphate
  modified_base 10: mod_base = OTHER; note = 2'-fluoroadenosine-3'-phosphate
  modified_base 11: mod_base = OTHER; note = 2'-fluoroadenosine-3'-phosphate
  modified_base 12: mod_base = OTHER; note = 2'-O-methyladenosine-3'-phosphate
  modified_base 13: mod_base = OTHER; note = 2'-fluoroguanosine-3'-phosphate
  modified_base 14: mod_base = OTHER; note = 2'-O-methylguanosine-3'-phosphate
  modified_base 15: mod_base = OTHER; note = 2'-fluorouridine-3'-phosphate
  modified_base 16: mod_base = OTHER; note = 2'-O-methylguanosine-3'-phosphate
  modified_base 17: mod_base = OTHER; note = 2'-fluorouridine-3'-phosphate
  modified_base 18: mod_base = OTHER; note = 2'-O-methyluridine-3'-phosphate
  modified_base 19: mod_base = OTHER; note = 2'-fluorocytidine-3'-phosphate
  modified_base 20: mod_base = OTHER; note = 2'-O-methyladenosine-3'-phosphate
  modified_base 21: mod_base = OTHER; note 2'-fluoroadenosine-3'-phosphate-N-[tris(GalNAc-alkyl)-amido decanoyl)]-4-hydroxyprolinol (Hyp-(GalNAc-alkyl)3)
cagggggagaaaggtgttcaa

SEQ ID NO: 4316 - RNA, 21 nt, synthetic construct
  source 1..21: mol_type = other RNA
  modified_base 1: mod_base = OTHER; note = 2'-fluorocytidine-3'-phosphorothioate
  modified_base 2: mod_base = OTHER; note = 2'-O-methyladenosine-3'- phosphorothioate
  modified_base 3: mod_base = OTHER; note = 2'-fluorouridine-3'-phosphate
  modified_base 4: mod_base = OTHER; note = 2'-O-methyluridine-3'-phosphate
  modified_base 5: mod_base = OTHER; note = 2'-fluoroguanosine-3'-phosphate
  modified_base 6: mod_base = OTHER; note = 2'-O-methylguanosine-3'-phosphate
  modified_base 7: mod_base = OTHER; note = 2'-fluorouridine-3'-phosphate
  modified_base 8: mod_base = OTHER; note = 2'-O-methylguanosine-3'-phosphate
  modified_base 9: mod_base = OTHER; note = 2'-fluoroadenosine-3'-phosphate
  modified_base 10: mod_base = OTHER; note = 2'-fluoroguanosine-3'-phosphate
  modified_base 11: mod_base = OTHER; note = 2'-fluoroguanosine-3'-phosphate
  modified_base 12: mod_base = OTHER; note = 2'-O-methyladenosine-3'-phosphate
  modified_base 13: mod_base = OTHER; note = 2'-fluoroadenosine-3'-phosphate
  modified_base 14: mod_base = OTHER; note = 2'-O-methyladenosine-3'-phosphate
  modified_base 15: mod_base = OTHER; note = 2'-fluoroadenosine-3'-phosphate
  modified_base 16: mod_base = OTHER; note = 2'-O-methyladenosine-3'-phosphate
  modified_base 17: mod_base = OTHER; note = 2'-fluorouridine-3'-phosphate
  modified_base 18: mod_base = OTHER; note = 2'-O-methylcytidine-3'-phosphate
  modified_base 19: mod_base = OTHER; note = 2'-fluorocytidine-3'-phosphate
  modified_base 20: mod_base = OTHER; note = 2'-O-methyluridine-3'-phosphate
  modified_base 21: mod_base = OTHER; note 2'-fluorouridine-3'-phosphate-N-[tris(GalNAc-alkyl)-amidode canoyl)]-4-hydroxyprolinol (Hyp-(GalNAc-alkyl)3)
cattggtgaggaaaaatcctt

SEQ ID NO: 4317 - RNA, 21 nt, synthetic construct
  source 1..21: mol_type = other RNA
  modified_base 1: mod_base = OTHER; note = 2'-fluoroadenosine-3'-phosphorothioate
  modified_base 2: mod_base = OTHER; note = 2'-O-methylcytidine-3'- phosphorothioate
  modified_base 3: mod_base = OTHER; note = 2'-fluoroadenosine-3'-phosphate
  modified_base 4: mod_base = OTHER; note = 2'-O-methyluridine-3'-phosphate
  modified_base 5: mod_base = OTHER; note = 2'-fluorouridine-3'-phosphate
  modified_base 6: mod_base = OTHER; note = 2'-O-methylguanosine-3'-phosphate
  modified_base 7: mod_base = OTHER; note = 2'-fluoroguanosine-3'-phosphate
  modified_base 8: mod_base = OTHER; note = 2'-O-methyluridine-3'-phosphate
  modified_base 9: mod_base = OTHER; note = 2'-fluoroguanosine-3'-phosphate
  modified_base 10: mod_base = OTHER; note = 2'-fluoroadenosine-3'-phosphate
  modified_base 11: mod_base = OTHER; note = 2'-fluoroguanosine-3'-phosphate
  modified_base 12: mod_base = OTHER; note = 2'-O-methylguanosine-3'-phosphate
  modified_base 13: mod_base = OTHER; note = 2'-fluoroadenosine-3'-phosphate
  modified_base 14: mod_base = OTHER; note = 2'-O-methyladenosine-3'-phosphate
  modified_base 15: mod_base = OTHER; note = 2'-fluoroadenosine-3'-phosphate
  modified_base 16: mod_base = OTHER; note = 2'-O-methyladenosine-3'-phosphate
  modified_base 17: mod_base = OTHER; note = 2'-fluoroadenosine-3'-phosphate
  modified_base 18: mod_base = OTHER; note = 2'-O-methyluridine-3'-phosphate
  modified_base 19: mod_base = OTHER; note = 2'-fluorocytidine-3'-phosphate
  modified_base 20: mod_base = OTHER; note = 2'-O-methylcytidine-3'-phosphate
  modified_base 21: mod_base = OTHER; note 2'-fluorouridine-3'-phosphate-N-[tris(GalNAc-alkyl)-amidode canoyl)]-4-hydroxyprolinol (Hyp-(GalNAc-alkyl)3)
acattggtgaggaaaaatcct

SEQ ID NO: 4318 - RNA, 21 nt, synthetic construct
  source 1..21: mol_type = other RNA
  modified_base 1: mod_base = OTHER; note = 2'-fluoroadenosine-3'-phosphorothioate
  modified_base 2: mod_base = OTHER; note = 2'-O-methylguanosine-3'- phosphorothioate
  modified_base 3: mod_base = OTHER; note = 2'-fluoroguanosine-3'-phosphate
  modified_base 4: mod_base = OTHER; note = 2'-O-methylguanosine-3'-phosphate
  modified_base 5: mod_base = OTHER; note = 2'-fluoroguanosine-3'-phosphate
  modified_base 6: mod_base = OTHER; note = 2'-O-methylguanosine-3'-phosphate
  modified_base 7: mod_base = OTHER; note = 2'-fluoroadenosine-3'-phosphate
  modified_base 8: mod_base = OTHER; note = 2'-O-methylguanosine-3'-phosphate
  modified_base 9: mod_base = OTHER; note = 2'-fluoroadenosine-3'-phosphate
  modified_base 10: mod_base = OTHER; note = 2'-fluoroadenosine-3'-phosphate
  modified_base 11: mod_base = OTHER; note = 2'-fluoroadenosine-3'-phosphate
  modified_base 12: mod_base = OTHER; note = 2'-O-methylguanosine-3'-phosphate
  modified_base 13: mod_base = OTHER; note = 2'-fluoroguanosine-3'-phosphate
  modified_base 14: mod_base = OTHER; note = 2'-O-methyluridine-3'-phosphate
  modified_base 15: mod_base = OTHER; note = 2'-fluoroguanosine-3'-phosphate
  modified_base 16: mod_base = OTHER; note = 2'-O-methyluridine-3'-phosphate
  modified_base 17: mod_base = OTHER; note = 2'-fluorouridine-3'-phosphate
  modified_base 18: mod_base = OTHER; note = 2'-O-methylcytidine-3'-phosphate
  modified_base 19: mod_base = OTHER; note = 2'-fluoroadenosine-3'-phosphate
  modified_base 20: mod_base = OTHER; note = 2'-O-methyladenosine-3'-phosphate
  modified_base 21: mod_base = OTHER; note 2'-fluoroadenosine-3'-phosphate-N-[tris(GalNAc-alkyl)-amido decanoyl)]-4-hydroxyprolinol (Hyp-(GalNAc-alkyl)3)
agggggagaaaggtgttcaaa

SEQ ID NO: 4319 - RNA, 20 nt, synthetic construct
  source 1..20: mol_type = other RNA
gggagcattttcacaggtta

SEQ ID NO: 4320 - RNA, 20 nt, synthetic construct
  source 1..20: mol_type = other RNA
aattagccgggggagcattt

SEQ ID NO: 4321 - RNA, 20 nt, synthetic construct
  source 1..20: mol_type = other RNA
atcattgatacaaattagcc

SEQ ID NO: 4322 - RNA, 20 nt, synthetic construct
  source 1..20: mol_type = other RNA
gttgttcataatcattgata

SEQ ID NO: 4323 - RNA, 20 nt, synthetic construct
  source 1..20: mol_type = other RNA
gatttagcatgttgttcata

SEQ ID NO: 4324 - RNA, 20 nt, synthetic construct
  source 1..20: mol_type = other RNA
ttggaagtactgatttagca

SEQ ID NO: 4325 - RNA, 20 nt, synthetic construct
  source 1..20: mol_type = other RNA
catatatagactttggaagt

SEQ ID NO: 4326 - RNA, 20 nt, synthetic construct
  source 1..20: mol_type = other RNA
ctgtaatagtcatatataga

SEQ ID NO: 4327 - RNA, 20 nt, synthetic construct
  source 1..20: mol_type = other RNA
ttgccccagacctgtaatag

SEQ ID NO: 4328 - RNA, 20 nt, synthetic construct
  source 1..20: mol_type = other RNA
ttcttcatcatttgccccag

SEQ ID NO: 4329 - RNA, 20 nt, synthetic construct
  source 1..20: mol_type = other RNA
tatcagccaaagtttcttca

SEQ ID NO: 4330 - RNA, 20 nt, synthetic construct
  source 1..20: mol_type = other RNA
gctgcaatattatcagccaa

SEQ ID NO: 4331 - RNA, 20 nt, synthetic construct
  source 1..20: mol_type = other RNA
atctggaaaatgctgcaata

SEQ ID NO: 4332 - RNA, 20 nt, synthetic construct
  source 1..20: mol_type = other RNA
gatacagcttccatctggaa

SEQ ID NO: 4333 - RNA, 20 nt, synthetic construct
  source 1..20: mol_type = other RNA
gagcatccttggatacagct

SEQ ID NO: 4334 - RNA, 20 nt, synthetic construct
  source 1..20: mol_type = other RNA
caacattccggagcatcctt

SEQ ID NO: 4335 - RNA, 20 nt, synthetic construct
  source 1..20: mol_type = other RNA
gatctgtttcagcaacattc

SEQ ID NO: 4336 - RNA, 20 nt, synthetic construct
  source 1..20: mol_type = other RNA
agaagtcgacagatctgttt

SEQ ID NO: 4337 - RNA, 20 nt, synthetic construct
  source 1..20: mol_type = other RNA
tgtcctaaaacagaagtcga

SEQ ID NO: 4338 - RNA, 20 nt, synthetic construct
  source 1..20: mol_type = other RNA
tgctgaccctctgtcctaaa

SEQ ID NO: 4339 - RNA, 20 nt, synthetic construct
  source 1..20: mol_type = other RNA
catattggcatgctgaccct

SEQ ID NO: 4340 - RNA, 20 nt, synthetic construct
  source 1..20: mol_type = other RNA
agcccccacacatattggca

SEQ ID NO: 4341 - RNA, 20 nt, synthetic construct
  source 1..20: mol_type = other RNA
ctgcatggccgtagccccca

SEQ ID NO: 4342 - RNA, 20 nt, synthetic construct
  source 1..20: mol_type = other RNA
gagccatgcgctgcatggcc

SEQ ID NO: 4343 - RNA, 20 nt, synthetic construct
  source 1..20: mol_type = other RNA
gccgtccacatgagccatgc

SEQ ID NO: 4344 - RNA, 20 nt, synthetic construct
  source 1..20: mol_type = other RNA
agtggcaagctcgccgtcca

SEQ ID NO: 4345 - RNA, 20 nt, synthetic construct
  source 1..20: mol_type = other RNA
acaggctctcacagtggcaa

SEQ ID NO: 4346 - RNA, 20 nt, synthetic construct
  source 1..20: mol_type = other RNA
cagggactgacaggctctca

SEQ ID NO: 4347 - RNA, 20 nt, synthetic construct
  source 1..20: mol_type = other RNA
atgcccgttcccagggactg

SEQ ID NO: 4348 - RNA, 20 nt, synthetic construct
  source 1..20: mol_type = other RNA
gaactcaacatcatgcccgt

SEQ ID NO: 4349 - RNA, 20 nt, synthetic construct
  source 1..20: mol_type = other RNA
gaggtggcccaggaactcaa

SEQ ID NO: 4350 - RNA, 20 nt, synthetic construct
  source 1..20: mol_type = other RNA
tcaattgaggaggtggccca

SEQ ID NO: 4351 - RNA, 20 nt, synthetic construct
  source 1..20: mol_type = other RNA
ccgccacttcttcaattgag

SEQ ID NO: 4352 - RNA, 20 nt, synthetic construct
  source 1..20: mol_type = other RNA
caggaccagcttccgccact

SEQ ID NO: 4353 - RNA, 20 nt, synthetic construct
  source 1..20: mol_type = other RNA
acgaagtgcctcaggaccag

SEQ ID NO: 4354 - RNA, 20 nt, synthetic construct
  source 1..20: mol_type = other RNA
cagttgcagccaacgaagtg

SEQ ID NO: 4355 - RNA, 20 nt, synthetic construct
  source 1..20: mol_type = other RNA
tgtagatatacagttgcagc

SEQ ID NO: 4356 - RNA, 20 nt, synthetic construct
  source 1..20: mol_type = other RNA
tctcggtccttgtagatata

SEQ ID NO: 4357 - RNA, 20 nt, synthetic construct
  source 1..20: mol_type = other RNA
ttcttggtgacttctcggtc

SEQ ID NO: 4358 - RNA, 20 nt, synthetic construct
  source 1..20: mol_type = other RNA
ccgcactagcttcttggtga

SEQ ID NO: 4359 - RNA, 20 nt, synthetic construct
  source 1..20: mol_type = other RNA
cttctctgcctgccgcacta

SEQ ID NO: 4360 - RNA, 20 nt, synthetic construct
  source 1..20: mol_type = other RNA
cttgtagcccatcttctctg

SEQ ID NO: 4361 - RNA, 20 nt, synthetic construct
  source 1..20: mol_type = other RNA
aaatatggccttgtagccca

SEQ ID NO: 4362 - RNA, 20 nt, synthetic construct
  source 1..20: mol_type = other RNA
tgtccactgtcacaaatatg

SEQ ID NO: 4363 - RNA, 20 nt, synthetic construct
  source 1..20: mol_type = other RNA
caggtaaggtgtgtccactg

SEQ ID NO: 4364 - RNA, 20 nt, synthetic construct
  source 1..20: mol_type = other RNA
gacggttgcccaggtaaggt

SEQ ID NO: 4365 - RNA, 20 nt, synthetic construct
  source 1..20: mol_type = other RNA
cacatcatccagacggttgc

SEQ ID NO: 4366 - RNA, 20 nt, synthetic construct
  source 1..20: mol_type = other RNA
aatctgttacgcacatcatc

SEQ ID NO: 4367 - RNA, 20 nt, synthetic construct
  source 1..20: mol_type = other RNA
gcggcagtttgaatctgtta

SEQ ID NO: 4368 - RNA, 20 nt, synthetic construct
  source 1..20: mol_type = other RNA
ctgagttgtggcggcagttt

SEQ ID NO: 4369 - RNA, 20 nt, synthetic construct
  source 1..20: mol_type = other RNA
aaaatttttcatcctgagtt

SEQ ID NO: 4370 - RNA, 20 nt, synthetic construct
  source 1..20: mol_type = other RNA
tactggtttcaaaatttttc

SEQ ID NO: 4371 - RNA, 20 nt, synthetic construct
  source 1..20: mol_type = other RNA
aaatgataaagtactggttt

SEQ ID NO: 4372 - RNA, 20 nt, synthetic construct
  source 1..20: mol_type = other RNA
cctcaggagaaaatgataaa

SEQ ID NO: 4373 - RNA, 20 nt, synthetic construct
  source 1..20: mol_type = other RNA
tccaaaattttcctcaggag

SEQ ID NO: 4374 - RNA, 20 nt, synthetic construct
  source 1..20: mol_type = other RNA
gtccactgtcgtctccaaaa

SEQ ID NO: 4375 - RNA, 20 nt, synthetic construct
  source 1..20: mol_type = other RNA
atatgcagcaagtccactgt

SEQ ID NO: 4376 - RNA, 20 nt, synthetic construct
  source 1..20: mol_type = other RNA
tttagccacatatgcagcaa

SEQ ID NO: 4377 - RNA, 20 nt, synthetic construct
  source 1..20: mol_type = other RNA
tgggtctattgctttagcca

SEQ ID NO: 4378 - RNA, 20 nt, synthetic construct
  source 1..20: mol_type = other RNA
agctgatagatgggtctatt

SEQ ID NO: 4379 - RNA, 20 nt, synthetic construct
  source 1..20: mol_type = other RNA
gatatcttcccagctgatag

SEQ ID NO: 4380 - RNA, 20 nt, synthetic construct
  source 1..20: mol_type = other RNA
ctcagccatttgatatcttc

SEQ ID NO: 4381 - RNA, 20 nt, synthetic construct
  source 1..20: mol_type = other RNA
gatgtcagtcttctcagcca

SEQ ID NO: 4382 - RNA, 20 nt, synthetic construct
  source 1..20: mol_type = other RNA
caattggcaatgatgtcagt

SEQ ID NO: 4383 - RNA, 20 nt, synthetic construct
  source 1..20: mol_type = other RNA
ccctttgcaacaattggcaa

SEQ ID NO: 4384 - RNA, 20 nt, synthetic construct
  source 1..20: mol_type = other RNA
ctctcaaaatgccctttgca

SEQ ID NO: 4385 - RNA, 20 nt, synthetic construct
  source 1..20: mol_type = other RNA
ggcatcatcacctctcaaaa

SEQ ID NO: 4386 - RNA, 20 nt, synthetic construct
  source 1..20: mol_type = other RNA
aacagcctccctggcatcat

SEQ ID NO: 4387 - RNA, 20 nt, synthetic construct
  source 1..20: mol_type = other RNA
aagccatgtttaacagcctc

SEQ ID NO: 4388 - RNA, 20 nt, synthetic construct
  source 1..20: mol_type = other RNA
aagatcccattcaagccatg

SEQ ID NO: 4389 - RNA, 20 nt, synthetic construct
  source 1..20: mol_type = other RNA
ttcgacaccaagatcccatt

SEQ ID NO: 4390 - RNA, 20 nt, synthetic construct
  source 1..20: mol_type = other RNA
tcgagccccatgattcgaca

SEQ ID NO: 4391 - RNA, 20 nt, synthetic construct
  source 1..20: mol_type = other RNA
atcgagttgtcgagccccat

SEQ ID NO: 4392 - RNA, 20 nt, synthetic construct
  source 1..20: mol_type = other RNA
ggctggcaccccatcgagtt

SEQ ID NO: 4393 - RNA, 20 nt, synthetic construct
  source 1..20: mol_type = other RNA
aacatcaatagtggctggca

SEQ ID NO: 4394 - RNA, 20 nt, synthetic construct
  source 1..20: mol_type = other RNA
atttctggcagaacatcaat

SEQ ID NO: 4395 - RNA, 20 nt, synthetic construct
  source 1..20: mol_type = other RNA
agcctccacaatttctggca

SEQ ID NO: 4396 - RNA, 20 nt, synthetic construct
  source 1..20: mol_type = other RNA
cttcccttccacagcctcca

SEQ ID NO: 4397 - RNA, 20 nt, synthetic construct
  source 1..20: mol_type = other RNA
aagacttccaccttcccttc

SEQ ID NO: 4398 - RNA, 20 nt, synthetic construct
  source 1..20: mol_type = other RNA
ccgtccaggaagacttccac

SEQ ID NO: 4399 - RNA, 20 nt, synthetic construct
  source 1..20: mol_type = other RNA
tccgcacacccccgtccagg

SEQ ID NO: 4400 - RNA, 20 nt, synthetic construct
  source 1..20: mol_type = other RNA
catcagtgcctttccgcaca

SEQ ID NO: 4401 - RNA, 20 nt, synthetic construct
  source 1..20: mol_type = other RNA
agctttcagaacatcagtgc

SEQ ID NO: 4402 - RNA, 20 nt, synthetic construct
  source 1..20: mol_type = other RNA
caagagccagagctttcaga

SEQ ID NO: 4403 - RNA, 20 nt, synthetic construct
  source 1..20: mol_type = other RNA
acagccttggcgccaagagc

SEQ ID NO: 4404 - RNA, 20 nt, synthetic construct
  source 1..20: mol_type = other RNA
tccccacaaacacagccttg

SEQ ID NO: 4405 - RNA, 20 nt, synthetic construct
  source 1..20: mol_type = other RNA
acgattggtctccccacaaa

SEQ ID NO: 4406 - RNA, 20 nt, synthetic construct
  source 1..20: mol_type = other RNA
taagccccaaacgattggtc

SEQ ID NO: 4407 - RNA, 20 nt, synthetic construct
  source 1..20: mol_type = other RNA
ccctggaaagctaagcccca

SEQ ID NO: 4408 - RNA, 20 nt, synthetic construct
  source 1..20: mol_type = other RNA
cacctttctccccctggaaa

SEQ ID NO: 4409 - RNA, 20 nt, synthetic construct
  source 1..20: mol_type = other RNA
gacatcttgaacacctttct

SEQ ID NO: 4410 - RNA, 20 nt, synthetic construct
  source 1..20: mol_type = other RNA
tagtatctcgaggacatctt

SEQ ID NO: 4411 - RNA, 20 nt, synthetic construct
  source 1..20: mol_type = other RNA
gaattcttcctttagtatct

SEQ ID NO: 4412 - RNA, 20 nt, synthetic construct
  source 1..20: mol_type = other RNA
ggccaaccggaattcttcct

SEQ ID NO: 4413 - RNA, 20 nt, synthetic construct
  source 1..20: mol_type = other RNA
ctcagagccatggccaaccg

SEQ ID NO: 4414 - RNA, 20 nt, synthetic construct
  source 1..20: mol_type = other RNA
attctggcacccactcagag

SEQ ID NO: 4415 - RNA, 20 nt, synthetic construct
  source 1..20: mol_type = other RNA
atgactttcacattctggca

SEQ ID NO: 4416 - RNA, 20 nt, synthetic construct
  source 1..20: mol_type = other RNA
gtcttgtcgatgactttcac

SEQ ID NO: 4417 - RNA, 20 nt, synthetic construct
  source 1..20: mol_type = other RNA
tttcctcaccaatgtcttgt

SEQ ID NO: 4418 - RNA, 20 nt, synthetic construct
  source 1..20: mol_type = other RNA
caaaggatttttcctcacca

SEQ ID NO: 4419 - RNA, 20 nt, synthetic construct
  source 1..20: mol_type = other RNA
ttggaaacggccaaaggatt

SEQ ID NO: 4420 - RNA, 20 nt, synthetic construct
  source 1..20: mol_type = other RNA
gcactgtcagatcttggaaa

SEQ ID NO: 4421 - RNA, 20 nt, synthetic construct
  source 1..20: mol_type = other RNA
aaatattgtgcactgtcaga

SEQ ID NO: 4422 - RNA, 20 nt, synthetic construct
  source 1..20: mol_type = other RNA
tacagatgggaaaatattgt

SEQ ID NO: 4423 - RNA, 20 nt, synthetic construct
  source 1..20: mol_type = other RNA
tgaaaaaaaataatacagat

SEQ ID NO: 4424 - RNA, 20 nt, synthetic construct
  source 1..20: mol_type = other RNA
taatacatgctgaaaaaaaa

SEQ ID NO: 4425 - RNA, 20 nt, synthetic construct
  source 1..20: mol_type = other RNA
ctctttgtcaagtaatacat

SEQ ID NO: 4426 - RNA, 20 nt, synthetic construct
  source 1..20: mol_type = other RNA
gcacagtgtctctttgtcaa

SEQ ID NO: 4427 - RNA, 20 nt, synthetic construct
  source 1..20: mol_type = other RNA
tggtcaccctctgcacagtg

SEQ ID NO: 4428 - RNA, 20 nt, synthetic construct
  source 1..20: mol_type = other RNA
ttacagactgtggtcaccct

SEQ ID NO: 4429 - RNA, 20 nt, synthetic construct
  source 1..20: mol_type = other RNA
ttgaagtggggaattacaga

SEQ ID NO: 4430 - RNA, 20 nt, synthetic construct
  source 1..20: mol_type = other RNA
ccctttgtattgaagtgggg

SEQ ID NO: 4431 - RNA, 20 nt, synthetic construct
  source 1..20: mol_type = other RNA
aaagaacgacaccctttgta

SEQ ID NO: 4432 - RNA, 20 nt, synthetic construct
  source 1..20: mol_type = other RNA
tattttgttggaaaagaacg

SEQ ID NO: 4433 - RNA, 20 nt, synthetic construct
  source 1..20: mol_type = other RNA
aagggattgctattttgttg

SEQ ID NO: 4434 - RNA, 20 nt, synthetic construct
  source 1..20: mol_type = other RNA
gcaatgaaataaaagggatt

SEQ ID NO: 4435 - RNA, 20 nt, synthetic construct
  source 1..20: mol_type = other RNA
aaaagtcaaaagcaatgaaa

SEQ ID NO: 4436 - RNA, 20 nt, synthetic construct
  source 1..20: mol_type = other RNA
gacacccattgaaaagtcaa

SEQ ID NO: 4437 - RNA, 20 nt, synthetic construct
  source 1..20: mol_type = other RNA
aaaggttcctaggacaccca

SEQ ID NO: 4438 - RNA, 20 nt, synthetic construct
  source 1..20: mol_type = other RNA
tttctttctaaaaggttcct

SEQ ID NO: 4439 - RNA, 20 nt, synthetic construct
  source 1..20: mol_type = other RNA
tgaaagtccatttctttcta

SEQ ID NO: 4440 - RNA, 20 nt, synthetic construct
  source 1..20: mol_type = other RNA
tatatttccaggatgaaagt

SEQ ID NO: 4441 - RNA, 20 nt, synthetic construct
  source 1..20: mol_type = other RNA
taacagttaatatatttcca

SEQ ID NO: 4442 - RNA, 20 nt, synthetic construct
  source 1..20: mol_type = other RNA
gttttctttttaacagttaa

SEQ ID NO: 4443 - RNA, 20 nt, synthetic construct
  source 1..20: mol_type = other RNA
cacattttcaatgttttctt

SEQ ID NO: 4444 - RNA, 20 nt, synthetic construct
  source 1..20: mol_type = other RNA
acgttgtctaaacacatttt

SEQ ID NO: 4445 - RNA, 20 nt, synthetic construct
  source 1..20: mol_type = other RNA
caggggatgacgttgtctaa

SEQ ID NO: 4446 - RNA, 20 nt, synthetic construct
  source 1..20: mol_type = other RNA
cactttagcctgccagggga

SEQ ID NO: 4447 - RNA, 20 nt, synthetic construct
  source 1..20: mol_type = other RNA
aaaggatacagcactttagc

SEQ ID NO: 4448 - RNA, 20 nt, synthetic construct
  source 1..20: mol_type = other RNA
caattttactaaaggataca

SEQ ID NO: 4449 - RNA, 20 nt, synthetic construct
  source 1..20: mol_type = other RNA
ttgctacctccaattttact

SEQ ID NO: 4450 - RNA, 20 nt, synthetic construct
  source 1..20: mol_type = other RNA
caccttagtgtttgctacct

SEQ ID NO: 4451 - RNA, 20 nt, synthetic construct
  source 1..20: mol_type = other RNA
tcattatcttttcaccttag

SEQ ID NO: 4452 - RNA, 20 nt, synthetic construct
  source 1..20: mol_type = other RNA
aacaatgagatcattatctt

SEQ ID NO: 4453 - RNA, 20 nt, synthetic construct
  source 1..20: mol_type = other RNA
tacaggttaataaacaatga

SEQ ID NO: 4454 - RNA, 20 nt, synthetic construct
  source 1..20: mol_type = other RNA
gtaaacagaatacaggttaa

SEQ ID NO: 4455 - RNA, 20 nt, synthetic construct
  source 1..20: mol_type = other RNA
tttaaagacatgtaaacaga

SEQ ID NO: 4456 - RNA, 20 nt, synthetic construct
  source 1..20: mol_type = other RNA
aagaaccactgttttaaaga

SEQ ID NO: 4457 - RNA, 20 nt, synthetic construct
  source 1..20: mol_type = other RNA
cttacaatttaagaaccact

SEQ ID NO: 4458 - RNA, 20 nt, synthetic construct
  source 1..20: mol_type = other RNA
ctttgaacctgagcttacaa

SEQ ID NO: 4459 - RNA, 20 nt, synthetic construct
  source 1..20: mol_type = other RNA
attaccaacactttgaacct

SEQ ID NO: 4460 - RNA, 20 nt, synthetic construct
  source 1..20: mol_type = other RNA
tgtgaatcaggcattaccaa

SEQ ID NO: 4461 - RNA, 20 nt, synthetic construct
  source 1..20: mol_type = other RNA
tctcaaagttgtgaatcagg

SEQ ID NO: 4462 - RNA, 20 nt, synthetic construct
  source 1..20: mol_type = other RNA
cagtgctaccttctcaaagt

SEQ ID NO: 4463 - RNA, 20 nt, synthetic construct
  source 1..20: mol_type = other RNA
ttccaattctctccagtgct

SEQ ID NO: 4464 - RNA, 20 nt, synthetic construct
  source 1..20: mol_type = other RNA
ccgccacccattccaattct

SEQ ID NO: 4465 - RNA, 20 nt, synthetic construct
  source 1..20: mol_type = other RNA
tcaccaattaccgccaccca

SEQ ID NO: 4466 - RNA, 20 nt, synthetic construct
  source 1..20: mol_type = other RNA
attcaaagaagtatcaccaa

SEQ ID NO: 4467 - RNA, 20 nt, synthetic construct
  source 1..20: mol_type = other RNA
tggaaatctacattcaaaga

SEQ ID NO: 4468 - RNA, 20 nt, synthetic construct
  source 1..20: mol_type = other RNA
aagatgtgattggaaatcta

SEQ ID NO: 4469 - RNA, 20 nt, synthetic construct
  source 1..20: mol_type = other RNA
ttcagacactaaagatgtga

SEQ ID NO: 4470 - RNA, 20 nt, synthetic construct
  source 1..20: mol_type = other RNA
catttggatatattcagaca

SEQ ID NO: 4471 - RNA, 20 nt, synthetic construct
  source 1..20: mol_type = other RNA
catcctaaaacatttggata

SEQ ID NO: 4472 - RNA, 20 nt, synthetic construct
  source 1..20: mol_type = other RNA
aagtaacatacatcctaaaa

SEQ ID NO: 4473 - RNA, 20 nt, synthetic construct
  source 1..20: mol_type = other RNA
tttctctctaagaagtaaca

SEQ ID NO: 4474 - RNA, 20 nt, synthetic construct
  source 1..20: mol_type = other RNA
aaatgctttatttctctcta

SEQ ID NO: 4475 - RNA, 20 nt, synthetic construct
  source 1..20: mol_type = other RNA
taacctgtgaaaatgctccc

SEQ ID NO: 4476 - RNA, 20 nt, synthetic construct
  source 1..20: mol_type = other RNA
aaatgctcccccggctaatt

SEQ ID NO: 4477 - RNA, 20 nt, synthetic construct
  source 1..20: mol_type = other RNA
ggctaatttgtatcaatgat

SEQ ID NO: 4478 - RNA, 20 nt, synthetic construct
  source 1..20: mol_type = other RNA
tatcaatgattatgaacaac

SEQ ID NO: 4479 - RNA, 20 nt, synthetic construct
  source 1..20: mol_type = other RNA
tatgaacaacatgctaaatc

SEQ ID NO: 4480 - RNA, 20 nt, synthetic construct
  source 1..20: mol_type = other RNA
tgctaaatcagtacttccaa

SEQ ID NO: 4481 - RNA, 20 nt, synthetic construct
  source 1..20: mol_type = other RNA
acttccaaagtctatatatg

SEQ ID NO: 4482 - RNA, 20 nt, synthetic construct
  source 1..20: mol_type = other RNA
tctatatatgactattacag

SEQ ID NO: 4483 - RNA, 20 nt, synthetic construct
  source 1..20: mol_type = other RNA
ctattacaggtctggggcaa

SEQ ID NO: 4484 - RNA, 20 nt, synthetic construct
  source 1..20: mol_type = other RNA
ctggggcaaatgatgaagaa

SEQ ID NO: 4485 - RNA, 20 nt, synthetic construct
  source 1..20: mol_type = other RNA
tgaagaaactttggctgata

SEQ ID NO: 4486 - RNA, 20 nt, synthetic construct
  source 1..20: mol_type = other RNA
ttggctgataatattgcagc

SEQ ID NO: 4487 - RNA, 20 nt, synthetic construct
  source 1..20: mol_type = other RNA
tattgcagcattttccagat

SEQ ID NO: 4488 - RNA, 20 nt, synthetic construct
  source 1..20: mol_type = other RNA
ttccagatggaagctgtatc

SEQ ID NO: 4489 - RNA, 20 nt, synthetic construct
  source 1..20: mol_type = other RNA
agctgtatccaaggatgctc

SEQ ID NO: 4490 - RNA, 20 nt, synthetic construct
  source 1..20: mol_type = other RNA
aaggatgctccggaatgttg

SEQ ID NO: 4491 - RNA, 20 nt, synthetic construct
  source 1..20: mol_type = other RNA
gaatgttgctgaaacagatc

SEQ ID NO: 4492 - RNA, 20 nt, synthetic construct
  source 1..20: mol_type = other RNA
aaacagatctgtcgacttct

SEQ ID NO: 4493 - RNA, 20 nt, synthetic construct
  source 1..20: mol_type = other RNA
tcgacttctgttttaggaca

SEQ ID NO: 4494 - RNA, 20 nt, synthetic construct
  source 1..20: mol_type = other RNA
tttaggacagagggtcagca

SEQ ID NO: 4495 - RNA, 20 nt, synthetic construct
  source 1..20: mol_type = other RNA
agggtcagcatgccaatatg

SEQ ID NO: 4496 - RNA, 20 nt, synthetic construct
  source 1..20: mol_type = other RNA
tgccaatatgtgtgggggct

SEQ ID NO: 4497 - RNA, 20 nt, synthetic construct
  source 1..20: mol_type = other RNA
tgggggctacggccatgcag

SEQ ID NO: 4498 - RNA, 20 nt, synthetic construct
  source 1..20: mol_type = other RNA
ggccatgcagcgcatggctc

SEQ ID NO: 4499 - RNA, 20 nt, synthetic construct
  source 1..20: mol_type = other RNA
gcatggctcatgtggacggc

SEQ ID NO: 4500 - RNA, 20 nt, synthetic construct
  source 1..20: mol_type = other RNA
tggacggcgagcttgccact

SEQ ID NO: 4501 - RNA, 20 nt, synthetic construct
  source 1..20: mol_type = other RNA
ttgccactgtgagagcctgt

SEQ ID NO: 4502 - RNA, 20 nt, synthetic construct
  source 1..20: mol_type = other RNA
tgagagcctgtcagtccctg

SEQ ID NO: 4503 - RNA, 20 nt, synthetic construct
  source 1..20: mol_type = other RNA
cagtccctgggaacgggcat

SEQ ID NO: 4504 - RNA, 20 nt, synthetic construct
  source 1..20: mol_type = other RNA
acgggcatgatgttgagttc

SEQ ID NO: 4505 - RNA, 20 nt, synthetic construct
  source 1..20: mol_type = other RNA
ttgagttcctgggccacctc

SEQ ID NO: 4506 - RNA, 20 nt, synthetic construct
  source 1..20: mol_type = other RNA
tgggccacctcctcaattga

SEQ ID NO: 4507 - RNA, 20 nt, synthetic construct
  source 1..20: mol_type = other RNA
ctcaattgaagaagtggcgg

SEQ ID NO: 4508 - RNA, 20 nt, synthetic construct
  source 1..20: mol_type = other RNA
agtggcggaagctggtcctg

SEQ ID NO: 4509 - RNA, 20 nt, synthetic construct
  source 1..20: mol_type = other RNA
ctggtcctgaggcacttcgt

SEQ ID NO: 4510 - RNA, 20 nt, synthetic construct
  source 1..20: mol_type = other RNA
cacttcgttggctgcaactg

SEQ ID NO: 4511 - RNA, 20 nt, synthetic construct
  source 1..20: mol_type = other RNA
gctgcaactgtatatctaca

SEQ ID NO: 4512 - RNA, 20 nt, synthetic construct
  source 1..20: mol_type = other RNA
tatatctacaaggaccgaga

SEQ ID NO: 4513 - RNA, 20 nt, synthetic construct
  source 1..20: mol_type = other RNA
gaccgagaagtcaccaagaa

SEQ ID NO: 4514 - RNA, 20 nt, synthetic construct
  source 1..20: mol_type = other RNA
tcaccaagaagctagtgcgg

SEQ ID NO: 4515 - RNA, 20 nt, synthetic construct
  source 1..20: mol_type = other RNA
tagtgcggcaggcagagaag

SEQ ID NO: 4516 - RNA, 20 nt, synthetic construct
  source 1..20: mol_type = other RNA
cagagaagatgggctacaag

SEQ ID NO: 4517 - RNA, 20 nt, synthetic construct
  source 1..20: mol_type = other RNA
tgggctacaaggccatattt

SEQ ID NO: 4518 - RNA, 20 nt, synthetic construct
  source 1..20: mol_type = other RNA
catatttgtgacagtggaca

SEQ ID NO: 4519 - RNA, 20 nt, synthetic construct
  source 1..20: mol_type = other RNA
cagtggacacaccttacctg

SEQ ID NO: 4520 - RNA, 20 nt, synthetic construct
  source 1..20: mol_type = other RNA
accttacctgggcaaccgtc

SEQ ID NO: 4521 - RNA, 20 nt, synthetic construct
  source 1..20: mol_type = other RNA
gcaaccgtctggatgatgtg

SEQ ID NO: 4522 - RNA, 20 nt, synthetic construct
  source 1..20: mol_type = other RNA
gatgatgtgcgtaacagatt

SEQ ID NO: 4523 - RNA, 20 nt, synthetic construct
  source 1..20: mol_type = other RNA
taacagattcaaactgccgc

SEQ ID NO: 4524 - RNA, 20 nt, synthetic construct
  source 1..20: mol_type = other RNA
aaactgccgccacaactcag

SEQ ID NO: 4525 - RNA, 20 nt, synthetic construct
  source 1..20: mol_type = other RNA
aactcaggatgaaaaatttt

SEQ ID NO: 4526 - RNA, 20 nt, synthetic construct
  source 1..20: mol_type = other RNA
gaaaaattttgaaaccagta

SEQ ID NO: 4527 - RNA, 20 nt, synthetic construct
  source 1..20: mol_type = other RNA
aaaccagtactttatcattt

SEQ ID NO: 4528 - RNA, 20 nt, synthetic construct
  source 1..20: mol_type = other RNA
tttatcattttctcctgagg

SEQ ID NO: 4529 - RNA, 20 nt, synthetic construct
  source 1..20: mol_type = other RNA
ctcctgaggaaaattttgga

SEQ ID NO: 4530 - RNA, 20 nt, synthetic construct
  source 1..20: mol_type = other RNA
ttttggagacgacagtggac

SEQ ID NO: 4531 - RNA, 20 nt, synthetic construct
  source 1..20: mol_type = other RNA
acagtggacttgctgcatat

SEQ ID NO: 4532 - RNA, 20 nt, synthetic construct
  source 1..20: mol_type = other RNA
ttgctgcatatgtggctaaa

SEQ ID NO: 4533 - RNA, 20 nt, synthetic construct
  source 1..20: mol_type = other RNA
tggctaaagcaatagaccca

SEQ ID NO: 4534 - RNA, 20 nt, synthetic construct
  source 1..20: mol_type = other RNA
aatagacccatctatcagct

SEQ ID NO: 4535 - RNA, 20 nt, synthetic construct
  source 1..20: mol_type = other RNA
ctatcagctgggaagatatc

SEQ ID NO: 4536 - RNA, 20 nt, synthetic construct
  source 1..20: mol_type = other RNA
gaagatatcaaatggctgag

SEQ ID NO: 4537 - RNA, 20 nt, synthetic construct
  source 1..20: mol_type = other RNA
tggctgagaagactgacatc

SEQ ID NO: 4538 - RNA, 20 nt, synthetic construct
  source 1..20: mol_type = other RNA
actgacatcattgccaattg

SEQ ID NO: 4539 - RNA, 20 nt, synthetic construct
  source 1..20: mol_type = other RNA
ttgccaattgttgcaaaggg

SEQ ID NO: 4540 - RNA, 20 nt, synthetic construct
  source 1..20: mol_type = other RNA
tgcaaagggcattttgagag

SEQ ID NO: 4541 - RNA, 20 nt, synthetic construct
  source 1..20: mol_type = other RNA
ttttgagaggtgatgatgcc

SEQ ID NO: 4542 - RNA, 20 nt, synthetic construct
  source 1..20: mol_type = other RNA
atgatgccagggaggctgtt

SEQ ID NO: 4543 - RNA, 20 nt, synthetic construct
  source 1..20: mol_type = other RNA
gaggctgttaaacatggctt

SEQ ID NO: 4544 - RNA, 20 nt, synthetic construct
  source 1..20: mol_type = other RNA
catggcttgaatgggatctt

SEQ ID NO: 4545 - RNA, 20 nt, synthetic construct
  source 1..20: mol_type = other RNA
aatgggatcttggtgtcgaa

SEQ ID NO: 4546 - RNA, 20 nt, synthetic construct
  source 1..20: mol_type = other RNA
atggggctcgacaactcgat

SEQ ID NO: 4547 - RNA, 20 nt, synthetic construct
  source 1..20: mol_type = other RNA
tgtcgaatcatggggctcga

SEQ ID NO: 4548 - RNA, 20 nt, synthetic construct
  source 1..20: mol_type = other RNA
aactcgatggggtgccagcc

SEQ ID NO: 4549 - RNA, 20 nt, synthetic construct
  source 1..20: mol_type = other RNA
tgccagccactattgatgtt

SEQ ID NO: 4550 - RNA, 20 nt, synthetic construct
  source 1..20: mol_type = other RNA
attgatgttctgccagaaat

SEQ ID NO: 4551 - RNA, 20 nt, synthetic construct
  source 1..20: mol_type = other RNA
tgccagaaattgtggaggct

SEQ ID NO: 4552 - RNA, 20 nt, synthetic construct
  source 1..20: mol_type = other RNA
tggaggctgtggaagggaag

SEQ ID NO: 4553 - RNA, 20 nt, synthetic construct
  source 1..20: mol_type = other RNA
gaagggaaggtggaagtctt

SEQ ID NO: 4554 - RNA, 20 nt, synthetic construct
  source 1..20: mol_type = other RNA
gtggaagtcttcctggacgg

SEQ ID NO: 4555 - RNA, 20 nt, synthetic construct
  source 1..20: mol_type = other RNA
cctggacgggggtgtgcgga

SEQ ID NO: 4556 - RNA, 20 nt, synthetic construct
  source 1..20: mol_type = other RNA
tgtgcggaaaggcactgatg

SEQ ID NO: 4557 - RNA, 20 nt, synthetic construct
  source 1..20: mol_type = other RNA
gcactgatgttctgaaagct

SEQ ID NO: 4558 - RNA, 20 nt, synthetic construct
  source 1..20: mol_type = other RNA
tctgaaagctctggctcttg

SEQ ID NO: 4559 - RNA, 20 nt, synthetic construct
  source 1..20: mol_type = other RNA
gctcttggcgccaaggctgt

SEQ ID NO: 4560 - RNA, 20 nt, synthetic construct
  source 1..20: mol_type = other RNA
caaggctgtgtttgtgggga

SEQ ID NO: 4561 - RNA, 20 nt, synthetic construct
  source 1..20: mol_type = other RNA
tttgtggggagaccaatcgt

SEQ ID NO: 4562 - RNA, 20 nt, synthetic construct
  source 1..20: mol_type = other RNA
gaccaatcgtttggggctta

SEQ ID NO: 4563 - RNA, 20 nt, synthetic construct
  source 1..20: mol_type = other RNA
tggggcttagctttccaggg

SEQ ID NO: 4564 - RNA, 20 nt, synthetic construct
  source 1..20: mol_type = other RNA
tttccagggggagaaaggtg

SEQ ID NO: 4565 - RNA, 20 nt, synthetic construct
  source 1..20: mol_type = other RNA
agaaaggtgttcaagatgtc

SEQ ID NO: 4566 - RNA, 20 nt, synthetic construct
  source 1..20: mol_type = other RNA
aagatgtcctcgagatacta

SEQ ID NO: 4567 - RNA, 20 nt, synthetic construct
  source 1..20: mol_type = other RNA
agatactaaaggaagaattc

SEQ ID NO: 4568 - RNA, 20 nt, synthetic construct
  source 1..20: mol_type = other RNA
aggaagaattccggttggcc

SEQ ID NO: 4569 - RNA, 20 nt, synthetic construct
  source 1..20: mol_type = other RNA
cggttggccatggctctgag

SEQ ID NO: 4570 - RNA, 20 nt, synthetic construct
  source 1..20: mol_type = other RNA
ctctgagtgggtgccagaat

SEQ ID NO: 4571 - RNA, 20 nt, synthetic construct
  source 1..20: mol_type = other RNA
tgccagaatgtgaaagtcat

SEQ ID NO: 4572 - RNA, 20 nt, synthetic construct
  source 1..20: mol_type = other RNA
gtgaaagtcatcgacaagac

SEQ ID NO: 4573 - RNA, 20 nt, synthetic construct
  source 1..20: mol_type = other RNA
acaagacattggtgaggaaa

SEQ ID NO: 4574 - RNA, 20 nt, synthetic construct
  source 1..20: mol_type = other RNA
tggtgaggaaaaatcctttg

SEQ ID NO: 4575 - RNA, 20 nt, synthetic construct
  source 1..20: mol_type = other RNA
aatcctttggccgtttccaa

SEQ ID NO: 4576 - RNA, 20 nt, synthetic construct
  source 1..20: mol_type = other RNA
tttccaagatctgacagtgc

SEQ ID NO: 4577 - RNA, 20 nt, synthetic construct
  source 1..20: mol_type = other RNA
tctgacagtgcacaatattt

SEQ ID NO: 4578 - RNA, 20 nt, synthetic construct
  source 1..20: mol_type = other RNA
acaatattttcccatctgta

SEQ ID NO: 4579 - RNA, 20 nt, synthetic construct
  source 1..20: mol_type = other RNA
atctgtattattttttttca

SEQ ID NO: 4580 - RNA, 20 nt, synthetic construct
  source 1..20: mol_type = other RNA
ttttttttcagcatgtatta

SEQ ID NO: 4581 - RNA, 20 nt, synthetic construct
  source 1..20: mol_type = other RNA
atgtattacttgacaaagag

SEQ ID NO: 4582 - RNA, 20 nt, synthetic construct
  source 1..20: mol_type = other RNA
ttgacaaagagacactgtgc

SEQ ID NO: 4583 - RNA, 20 nt, synthetic construct
  source 1..20: mol_type = other RNA
cactgtgcagagggtgacca

SEQ ID NO: 4584 - RNA, 20 nt, synthetic construct
  source 1..20: mol_type = other RNA
agggtgaccacagtctgtaa

SEQ ID NO: 4585 - RNA, 20 nt, synthetic construct
  source 1..20: mol_type = other RNA
tctgtaattccccacttcaa

SEQ ID NO: 4586 - RNA, 20 nt, synthetic construct
  source 1..20: mol_type = other RNA
ccccacttcaatacaaaggg

SEQ ID NO: 4587 - RNA, 20 nt, synthetic construct
  source 1..20: mol_type = other RNA
tacaaagggtgtcgttcttt

SEQ ID NO: 4588 - RNA, 20 nt, synthetic construct
  source 1..20: mol_type = other RNA
cgttcttttccaacaaaata

SEQ ID NO: 4589 - RNA, 20 nt, synthetic construct
  source 1..20: mol_type = other RNA
caacaaaatagcaatccctt

SEQ ID NO: 4590 - RNA, 20 nt, synthetic construct
  source 1..20: mol_type = other RNA
aatcccttttatttcattgc

SEQ ID NO: 4591 - RNA, 20 nt, synthetic construct
  source 1..20: mol_type = other RNA
tttcattgcttttgactttt

SEQ ID NO: 4592 - RNA, 20 nt, synthetic construct
  source 1..20: mol_type = other RNA
ttgacttttcaatgggtgtc

SEQ ID NO: 4593 - RNA, 20 nt, synthetic construct
  source 1..20: mol_type = other RNA
tgggtgtcctaggaaccttt

SEQ ID NO: 4594 - RNA, 20 nt, synthetic construct
  source 1..20: mol_type = other RNA
aggaaccttttagaaagaaa

SEQ ID NO: 4595 - RNA, 20 nt, synthetic construct
  source 1..20: mol_type = other RNA
tagaaagaaatggactttca

SEQ ID NO: 4596 - RNA, 20 nt, synthetic construct
  source 1..20: mol_type = other RNA
actttcatcctggaaatata

SEQ ID NO: 4597 - RNA, 20 nt, synthetic construct
  source 1..20: mol_type = other RNA
tggaaatatattaactgtta

SEQ ID NO: 4598 - RNA, 20 nt, synthetic construct
  source 1..20: mol_type = other RNA
ttaactgttaaaaagaaaac

SEQ ID NO: 4599 - RNA, 20 nt, synthetic construct
  source 1..20: mol_type = other RNA
aagaaaacattgaaaatgtg

SEQ ID NO: 4600 - RNA, 20 nt, synthetic construct
  source 1..20: mol_type = other RNA
aaaatgtgtttagacaacgt

SEQ ID NO: 4601 - RNA, 20 nt, synthetic construct
  source 1..20: mol_type = other RNA
ttagacaacgtcatcccctg

SEQ ID NO: 4602 - RNA, 20 nt, synthetic construct
  source 1..20: mol_type = other RNA
tcccctggcaggctaaagtg

SEQ ID NO: 4603 - RNA, 20 nt, synthetic construct
  source 1..20: mol_type = other RNA
gctaaagtgctgtatccttt

SEQ ID NO: 4604 - RNA, 20 nt, synthetic construct
  source 1..20: mol_type = other RNA
tgtatcctttagtaaaattg

SEQ ID NO: 4605 - RNA, 20 nt, synthetic construct
  source 1..20: mol_type = other RNA
agtaaaattggaggtagcaa

SEQ ID NO: 4606 - RNA, 20 nt, synthetic construct
  source 1..20: mol_type = other RNA
aggtagcaaacactaaggtg

SEQ ID NO: 4607 - RNA, 20 nt, synthetic construct
  source 1..20: mol_type = other RNA
ctaaggtgaaaagataatga

SEQ ID NO: 4608 - RNA, 20 nt, synthetic construct
  source 1..20: mol_type = other RNA
aagataatgatctcattgtt

SEQ ID NO: 4609 - RNA, 20 nt, synthetic construct
  source 1..20: mol_type = other RNA
tcattgtttattaacctgta

SEQ ID NO: 4610 - RNA, 20 nt, synthetic construct
  source 1..20: mol_type = other RNA
ttaacctgtattctgtttac

SEQ ID NO: 4611 - RNA, 20 nt, synthetic construct
  source 1..20: mol_type = other RNA
tctgtttacatgtctttaaa

SEQ ID NO: 4612 - RNA, 20 nt, synthetic construct
  source 1..20: mol_type = other RNA
tctttaaaacagtggttctt

SEQ ID NO: 4613 - RNA, 20 nt, synthetic construct
  source 1..20: mol_type = other RNA
agtggttcttaaattgtaag

SEQ ID NO: 4614 - RNA, 20 nt, synthetic construct
  source 1..20: mol_type = other RNA
ttgtaagctcaggttcaaag

SEQ ID NO: 4615 - RNA, 20 nt, synthetic construct
  source 1..20: mol_type = other RNA
aggttcaaagtgttggtaat

SEQ ID NO: 4616 - RNA, 20 nt, synthetic construct
  source 1..20: mol_type = other RNA
ttggtaatgcctgattcaca

SEQ ID NO: 4617 - RNA, 20 nt, synthetic construct
  source 1..20: mol_type = other RNA
cctgattcacaactttgaga

SEQ ID NO: 4618 - RNA, 20 nt, synthetic construct
  source 1..20: mol_type = other RNA
actttgagaaggtagcactg

SEQ ID NO: 4619 - RNA, 20 nt, synthetic construct
  source 1..20: mol_type = other RNA
agcactggagagaattggaa

SEQ ID NO: 4620 - RNA, 20 nt, synthetic construct
  source 1..20: mol_type = other RNA
agaattggaatgggtggcgg

SEQ ID NO: 4621 - RNA, 20 nt, synthetic construct
  source 1..20: mol_type = other RNA
tgggtggcggtaattggtga

SEQ ID NO: 4622 - RNA, 20 nt, synthetic construct
  source 1..20: mol_type = other RNA
ttggtgatacttctttgaat

SEQ ID NO: 4623 - RNA, 20 nt, synthetic construct
  source 1..20: mol_type = other RNA
tctttgaatgtagatttcca

SEQ ID NO: 4624 - RNA, 20 nt, synthetic construct
  source 1..20: mol_type = other RNA
tagatttccaatcacatctt

SEQ ID NO: 4625 - RNA, 20 nt, synthetic construct
  source 1..20: mol_type = other RNA
tcacatctttagtgtctgaa

SEQ ID NO: 4626 - RNA, 20 nt, synthetic construct
  source 1..20: mol_type = other RNA
tgtctgaatatatccaaatg

SEQ ID NO: 4627 - RNA, 20 nt, synthetic construct
  source 1..20: mol_type = other RNA
tatccaaatgttttaggatg

SEQ ID NO: 4628 - RNA, 20 nt, synthetic construct
  source 1..20: mol_type = other RNA
ttttaggatgtatgttactt

SEQ ID NO: 4629 - RNA, 20 nt, synthetic construct
  source 1..20: mol_type = other RNA
tgttacttcttagagagaaa

SEQ ID NO: 4630 - RNA, 20 nt, synthetic construct
  source 1..20: mol_type = other RNA
tagagagaaataaagcattt

SEQ ID NO: 4631-4640 - skipped (10 entries)

SEQ ID NO: 4641 - DNA, 1473 bp, Homo sapiens
  source 1..1473: mol_type = genomic DNA
agagaaccttccctggtgtggaggcagccagggacccaggatgctccggacctgttacgtgctctgttcccaagctggtcccccctccaggggctggcagtccctgagctttgatggcggggccttccaccttaagggcacaggagagctgacacgggccttgctggttctccggctgtgtgcctggcccccactcgtcactcacgggctgttgctccaggcctggtctcggcgactcctgggctcccggctctcaggcgcatttctccgagcatccgtctatgggcagtttgtggctggtgagacagcagaggaggtgaagggctgcgtgcagcagctgcggaccctcagcctccgaccactgctggcagtgcccactgaggaggagccggactctgctgccaagagtggtgaggcgtggtatgaggggaacctcggtgctatgctgcggtgtgtggacctgtcacggggcctcctggagccccccagcctggctgaggccagcctcatgcagctgaaggtgacggcgctgaccagtactcggctctgtaaggagctagcctcgtgggtcagaaggccaggagcctccttggagctgagccccgagaggctggctgaagctatggactctgggcagaacctccaggtctcctgcctcaatgctgagcagaaccagcacctccgggcctccctcagccgcctgcatcgggtggcacagtatgcccgggcccagcacgtgcggctcctggtggatgcggagtacacctcactgaaccctgcgctctcgctgctggtggctgccctggctgtgcgctggaacagcccgggtgaaggcgggccctgggtgtggaacacctaccaggcctgtctaaaggacacattcgagcggctggggagggatgcagaggctgcgcacagggccggcctggccttcggagtgaagctggtacgaggtgcatatctggacaaggagagagcggtggcccagctccatgggatggaagaccccactcagcctgactatgaggccaccagtcagagttacagccgctgcctggaactgatgctgacgcacgtggcccgccatggccccatgtgccacctcatggtggcttcccacaatgaggaatctgttcgccaggcaaccaagcgcatgtgggagctgggcattcctctggatgggactgtctgtttcggacaacttctgggcatgtgtgaccacgtctctctagcactggggcaggccggctatgtagtgtataagtccattccctatggctccttggaggaggtaatcccctacctgatccggagggcccaggagaaccggagcgtgcttcagggtgcccgcagggaacaggagctgctcagccaagaactgtggcggcggctgctgccaggatgccgaaggataccccactagcacccctgagggggtcatgtggtcaataaaagtccttaggtgctgcctaa

SEQ ID NO: 4642 - DNA, 1473 bp, Homo sapiens
  source 1..1473: mol_type = genomic DNA
ttaggcagcacctaaggacttttattgaccacatgaccccctcaggggtgctagtggggtatccttcggcatcctggcagcagccgccgccacagttcttggctgagcagctcctgttccctgcgggcaccctgaagcacgctccggttctcctgggccctccggatcaggtaggggattacctcctccaaggagccatagggaatggacttatacactacatagccggcctgccccagtgctagagagacgtggtcacacatgcccagaagttgtccgaaacagacagtcccatccagaggaatgcccagctcccacatgcgcttggttgcctggcgaacagattcctcattgtgggaagccaccatgaggtggcacatggggccatggcgggccacgtgcgtcagcatcagttccaggcagcggctgtaactctgactggtggcctcatagtcaggctgagtggggtcttccatcccatggagctgggccaccgctctctccttgtccagatatgcacctcgtaccagcttcactccgaaggccaggccggccctgtgcgcagcctctgcatccctccccagccgctcgaatgtgtcctttagacaggcctggtaggtgttccacacccagggcccgccttcacccgggctgttccagcgcacagccagggcagccaccagcagcgagagcgcagggttcagtgaggtgtactccgcatccaccaggagccgcacgtgctgggcccgggcatactgtgccacccgatgcaggcggctgagggaggcccggaggtgctggttctgctcagcattgaggcaggagacctggaggttctgcccagagtccatagcttcagccagcctctcggggctcagctccaaggaggctcctggccttctgacccacgaggctagctccttacagagccgagtactggtcagcgccgtcaccttcagctgcatgaggctggcctcagccaggctggggggctccaggaggccccgtgacaggtccacacaccgcagcatagcaccgaggttcccctcataccacgcctcaccactcttggcagcagagtccggctcctcctcagtgggcactgccagcagtggtcggaggctgagggtccgcagctgctgcacgcagcccttcacctcctctgctgtctcaccagccacaaactgcccatagacggatgctcggagaaatgcgcctgagagccgggagcccaggagtcgccgagaccaggcctggagcaacagcccgtgagtgacgagtgggggccaggcacacagccggagaaccagcaaggcccgtgtcagctctcctgtgcccttaaggtggaaggccccgccatcaaagctcagggactgccagcccctggaggggggaccagcttgggaacagagcacgtaacaggtccggagcatcctgggtccctggctgcctccacaccagggaaggttctct

SEQ ID NO: 4643 - DNA, 1817 bp, Mus musculus
  source 1..1817: mol_type = genomic DNA
agtgtggtggtaaccaggcacttgcaatgatctggacgcgtctgccgctgtatggcccctccaagccctctacaggtggctggcagcccctgcgctttgatggtggggccttccatgtcaagggaaccgcagaactggcacgggctttgctagtgcttcgcctatgcgcctggccccctttggtcactcatggactagcgtttcaggcctggtctcagcgactcctgggatcccggctctcaggcgcacttcttcgagcatccatctacgggcagtttgtggccggggagacagcagaggaagtgaggaactgtgtcgggcagctgcaggccctgggactccagcccctgttggcagtacccaccgaggaggaaccagactccactgccaagaccagtgaggtctggtatgaggagaaccttagcgccatgctgcgctgtgtggacttatcccgagccctcgtggacgcccacggcccagccaggaacagcctcatgcagctgaaggtgaccgcgctagccagcactcggctttgtaaagagctgtcggcttggatccaaagacccagaggctcctcggagctgagccctgagaggctggcagaagccatggactcgggtcggaacctccagctctcctgcctcagcacagaacagaatcagcacctgcaggcctccctcagccgcttgcaccgagtggcacagcacgcccgggcgaagtgtgtgcggctgctggtagatgctgaatatactttcattaaccctgcactgtccctgctggtggctgccctggctgtgcgctggaacagccctgaggaaggtggtccgtgggtgtggaacacttaccaggcctatctaaaggacactcaccaacggctggagcaggacgccgaggcagcacacaaggctggcctggcatttggggtgaagttggtgcgaggtgcctatctggacaaggagagatccatgacacagctccaagggaaggaagactgtacccagcctgactatgaggccactagtcggagttacagccgctgtctagagctgatgctgcgctgcgtgtcgaaccacggtcccccgtgtcacctcatggtggcttcccacaatgaagaatccgttcgccaggcaactaagcgcatgtgggagctgggcattcctctggatgggcctgtctgttttggacaacttctgggcatgtgtgaccatgtctccctggcattagggcaggctggatatatggtgtacaagtctattccctatggctgcctggaggaggtgattccctacctgatccgaagagcccaggagaacaggagtgtgctgcagggtgcccgcagggagcaggcactactcagccaggaactgtggcggagactgctgggaaggacggcctaagatgtctccatcagcaccatcaggggccatgtgctcaataaaggtcccgagtcctggccctgtctgtacttctcagaagctgcctccttggggaaagggctgaccctggtgtctgctcggacaggtggggcatgcctgagactcaagagatctttagtcctgtgtggtggcacactcctgttatcctagcacttgggaggctgagacaggagggccatgtgttccaagccagcctggactacagagtgagaagaaggaagaggaggagtgggagaggggaggggaggagaagtgctagcctagggtggtagtgacttggtaaccgaagggtaattaatccttcaatgtgcttagccagggatctagtcaagaattctttccctctcagaggatttgtaataaacaacacaggtgaatagc

SEQ ID NO: 4644 - DNA, 1817 bp, Mus musculus
  source 1..1817: mol_type = genomic DNA
gctattcacctgtgttgtttattacaaatcctctgagagggaaagaattcttgactagatccctggctaagcacattgaaggattaattacccttcggttaccaagtcactaccaccctaggctagcacttctcctcccctcccctctcccactcctcctcttccttcttctcactctgtagtccaggctggcttggaacacatggccctcctgtctcagcctcccaagtgctaggataacaggagtgtgccaccacacaggactaaagatctcttgagtctcaggcatgccccacctgtccgagcagacaccagggtcagccctttccccaaggaggcagcttctgagaagtacagacagggccaggactcgggacctttattgagcacatggcccctgatggtgctgatggagacatcttaggccgtccttcccagcagtctccgccacagttcctggctgagtagtgcctgctccctgcgggcaccctgcagcacactcctgttctcctgggctcttcggatcaggtagggaatcacctcctccaggcagccatagggaatagacttgtacaccatatatccagcctgccctaatgccagggagacatggtcacacatgcccagaagttgtccaaaacagacaggcccatccagaggaatgcccagctcccacatgcgcttagttgcctggcgaacggattcttcattgtgggaagccaccatgaggtgacacgggggaccgtggttcgacacgcagcgcagcatcagctctagacagcggctgtaactccgactagtggcctcatagtcaggctgggtacagtcttccttcccttggagctgtgtcatggatctctccttgtccagataggcacctcgcaccaacttcaccccaaatgccaggccagccttgtgtgctgcctcggcgtcctgctccagccgttggtgagtgtcctttagataggcctggtaagtgttccacacccacggaccaccttcctcagggctgttccagcgcacagccagggcagccaccagcagggacagtgcagggttaatgaaagtatattcagcatctaccagcagccgcacacacttcgcccgggcgtgctgtgccactcggtgcaagcggctgagggaggcctgcaggtgctgattctgttctgtgctgaggcaggagagctggaggttccgacccgagtccatggcttctgccagcctctcagggctcagctccgaggagcctctgggtctttggatccaagccgacagctctttacaaagccgagtgctggctagcgcggtcaccttcagctgcatgaggctgttcctggctgggccgtgggcgtccacgagggctcgggataagtccacacagcgcagcatggcgctaaggttctcctcataccagacctcactggtcttggcagtggagtctggttcctcctcggtgggtactgccaacaggggctggagtcccagggcctgcagctgcccgacacagttcctcacttcctctgctgtctccccggccacaaactgcccgtagatggatgctcgaagaagtgcgcctgagagccgggatcccaggagtcgctgagaccaggcctgaaacgctagtccatgagtgaccaaagggggccaggcgcataggcgaagcactagcaaagcccgtgccagttctgcggttcccttgacatggaaggccccaccatcaaagcgcaggggctgccagccacctgtagagggcttggaggggccatacagcggcagacgcgtccagatcattgcaagtgcctggttaccaccacact

SEQ ID NO: 4645 - DNA, 1466 bp, Rattus norvegicus
  source 1..1466: mol_type = genomic DNA
ggcacttacaatggtctggacgcgtctgccgctgtacggccactccaagccctctacaggtggctggcagcccctgcgctttgatggtggggccttccatctcaagagaaccgcagaactggcacgggctttgctggtgcttcgcctatgcgcctggccccctttggtcactcatggactagcgtttcaggcctggtctcagcgactcctgggatctcggctctcgggcgcacttctccgagcatccatctatggacagtttgtggccggggagacagcagaggaagtgaggggctgtgtccagcagctgcaggcgataggactccagcccctgttggcagtgcccaccgaggaggaaccagactccgctgccaagaccagtgaagcttggtatgaggggaaccttagcgccatgctgcactgtgtggacttgtcacgagctgtcgcagacgcccatggcccagccaggaacagcctcatgcagctgaaggtgaccgcgctaaccagccctcggctttgtaaggagctatcggcttggatccaaagaccaagaggctcctcggagctgaggcctgagaggctggcagaagccatggagtcaggtcggaacctccagctctcctgcctcagcacggaacagaatcaacacctgcaggcctccctcagccgcttgcaccgagtggcacagcacgcccgggcgcaggatgtgaggctgctggtggacgctgaatacacgttcatcaaccctgccctgtccctgctggtggctgccctggctatgcgctggaacagctcggaggaagagggcccgtgggtgtggaacacttaccaggcctatctgaaggacactcacgaacggctggagcgggatgctaaggcggcacacgaggctggcctggcatttggggtgaagttggtgagaggtgcctatctggacaaggagagatccgtgacacagctccacgggaaggaagactgtacccagcctgactatgaggccactagtcggagttacagccgctgtctggagctgatgctgcgccgcgtgtccaaccacggtccccggtgccacctcatggtggcttcccacaatgaagaatccattcgccaggcaacgaggcgcatgtgggagctgggcattcctctggatgggcctgtctgcttcggacaacttctgggcatgtgtgaccacgtctccctggcattagggcaagctggatacatggtatataagtctatcccctatggctgcctggaagaggtgataccctacctgatccgaagagcccaggagaacaggagtgtgctgcagggcgcccggagggagcaggcactactcagccaagaactgtggcggaggctgctgggaaggaaagcctaaggtttctccgtcagcaccatcaggggccgtgtgctcaataaaggtccttagccctaaaaaaaaaaaaaaaaaaaaaaaaaaaaaa

SEQ ID NO: 4646 - DNA, 1466 bp, Rattus norvegicus
  source 1..1466: mol_type = genomic DNA
ttttttttttttttttttttttttttttttagggctaaggacctttattgagcacacggcccctgatggtgctgacggagaaaccttaggctttccttcccagcagcctccgccacagttcttggctgagtagtgcctgctccctccgggcgccctgcagcacactcctgttctcctgggctcttcggatcaggtagggtatcacctcttccaggcagccataggggatagacttatataccatgtatccagcttgccctaatgccagggagacgtggtcacacatgcccagaagttgtccgaagcagacaggcccatccagaggaatgcccagctcccacatgcgcctcgttgcctggcgaatggattcttcattgtgggaagccaccatgaggtggcaccggggaccgtggttggacacgcggcgcagcatcagctccagacagcggctgtaactccgactagtggcctcatagtcaggctgggtacagtcttccttcccgtggagctgtgtcacggatctctccttgtccagataggcacctctcaccaacttcaccccaaatgccaggccagcctcgtgtgccgccttagcatcccgctccagccgttcgtgagtgtccttcagataggcctggtaagtgttccacacccacgggccctcttcctccgagctgttccagcgcatagccagggcagccaccagcagggacagggcagggttgatgaacgtgtattcagcgtccaccagcagcctcacatcctgcgcccgggcgtgctgtgccactcggtgcaagcggctgagggaggcctgcaggtgttgattctgttccgtgctgaggcaggagagctggaggttccgacctgactccatggcttctgccagcctctcaggcctcagctccgaggagcctcttggtctttggatccaagccgatagctccttacaaagccgagggctggttagcgcggtcaccttcagctgcatgaggctgttcctggctgggccatgggcgtctgcgacagctcgtgacaagtccacacagtgcagcatggcgctaaggttcccctcataccaagcttcactggtcttggcagcggagtctggttcctcctcggtgggcactgccaacaggggctggagtcctatcgcctgcagctgctggacacagcccctcacttcctctgctgtctccccggccacaaactgtccatagatggatgctcggagaagtgcgcccgagagccgagatcccaggagtcgctgagaccaggcctgaaacgctagtccatgagtgaccaaagggggccaggcgcataggcgaagcaccagcaaagcccgtgccagttctgcggttctcttgagatggaaggccccaccatcaaagcgcaggggctgccagccacctgtagagggcttggagtggccgtacagcggcagacgcgtccagaccattgtaagtgcc

SEQ ID NO: 4647 - DNA, 1636 bp, Macaca fascicularis
  source 1..1636: mol_type = genomic DNA
ttattgggggttcgcctcccgttaccgttactctgaactctgtccccatttgttaataattaattgccctcaaggagggagcctgtgatcctgaggctttgcccagttaatcagtcactgcccccagtctgggcaaggggcacttggtgaacctgctgcctccagagcaccttccctggtgtggaggcagccagggacccaggatgctctggacctgttacccgctctgttcccaagctggtcccctggcaaggggctggcagcccctgagctttgatggtggcgccttccacctcaagggcacaggagagctgacacgggccttgctggttctccggctgtgtgcctggcccccactcgtcactcacgggctggcgctccaggcctggtctcagcgactcctgggctcccggctctcaggcgcgtttctccgagcatctgtctatgggcagtttgtggctggtgagacggcagaggaggtgaggggctgcgtgcagcagctgcggaccctcagcctccgaccactgctggcagtgcccactgaggaggagccggactctgctgccaagagcggtgaggcctggtatgaggggaacctcggtgctatgctgcggtgtgtggacctgtcgaggaacctcctggagccccccagcctggctgaggccagcctcatgcagctgaaggtgacggcgttgaccagcgctcggctctgtaaggagctagcctcatgggtcagaaggccaggagctcccttggagctgagccccgagaggctggctgaagccatggactctgggcagaacctccaggtctcctgcctcaacgatgagcagaaccagcacctccaggcctccctcagccgcttgcatcgggtggcccagtatgcccgggcccagcacgtgcggctcctggtggatgcggagtacacctcactgaaccctgcgctctcgctgctggtggctgccctggccgtgcgctggaacagcccagaggaaggcgggccctgggtgtggaacacctaccaggcctgtctaaaggacacattcgagcggctggggagggacgcagaggctgcacacagggccggcctggccttcggagtgaagctggtacgaggtgcctatctggacaaggagagagcggtggcccagcttcatgggatgaaggaccccactcagcctgactatgaggccaccagtcagagttacagccgctgcctggaactgatgctgacgcgtgtggcccgccatggccccatgtgccacctcatggtggcttcccacaatgaggaatctgttcgccaggcaaccaagcgcatgtgggagctgggcattcctctggacgggactgtctgttttggacaacttctgggcatgtgtgaccacgtctctctggcactggggcaggccggctatgtagtgtataagtccatcccctatggctccttggaggaggtaatcccctacctgatccggagggcccaggaaaaccggagcgtgcttcagggtgtccgcagggaacaggagctgctcagccaagaactgtggcggcggctgctgccaggacgccgaaggataccccactagcacccctgagggggtcatgtggtcaataaaagtccttaggcactgccaaa

SEQ ID NO: 4648 - DNA, 1636 bp, Macaca fascicularis
  source 1..1636: mol_type = genomic DNA
tttggcagtgcctaaggacttttattgaccacatgaccccctcaggggtgctagtggggtatccttcggcgtcctggcagcagccgccgccacagttcttggctgagcagctcctgttccctgcggacaccctgaagcacgctccggttttcctgggccctccggatcaggtaggggattacctcctccaaggagccataggggatggacttatacactacatagccggcctgccccagtgccagagagacgtggtcacacatgcccagaagttgtccaaaacagacagtcccgtccagaggaatgcccagctcccacatgcgcttggttgcctggcgaacagattcctcattgtgggaagccaccatgaggtggcacatggggccatggcgggccacacgcgtcagcatcagttccaggcagcggctgtaactctgactggtggcctcatagtcaggctgagtggggtccttcatcccatgaagctgggccaccgctctctccttgtccagataggcacctcgtaccagcttcactccgaaggccaggccggccctgtgtgcagcctctgcgtccctccccagccgctcgaatgtgtcctttagacaggcctggtaggtgttccacacccagggcccgccttcctctgggctgttccagcgcacggccagggcagccaccagcagcgagagcgcagggttcagtgaggtgtactccgcatccaccaggagccgcacgtgctgggcccgggcatactgggccacccgatgcaagcggctgagggaggcctggaggtgctggttctgctcatcgttgaggcaggagacctggaggttctgcccagagtccatggcttcagccagcctctcggggctcagctccaagggagctcctggccttctgacccatgaggctagctccttacagagccgagcgctggtcaacgccgtcaccttcagctgcatgaggctggcctcagccaggctggggggctccaggaggttcctcgacaggtccacacaccgcagcatagcaccgaggttcccctcataccaggcctcaccgctcttggcagcagagtccggctcctcctcagtgggcactgccagcagtggtcggaggctgagggtccgcagctgctgcacgcagcccctcacctcctctgccgtctcaccagccacaaactgcccatagacagatgctcggagaaacgcgcctgagagccgggagcccaggagtcgctgagaccaggcctggagcgccagcccgtgagtgacgagtgggggccaggcacacagccggagaaccagcaaggcccgtgtcagctctcctgtgcccttgaggtggaaggcgccaccatcaaagctcaggggctgccagccccttgccaggggaccagcttgggaacagagcgggtaacaggtccagagcatcctgggtccctggctgcctccacaccagggaaggtgctctggaggcagcaggttcaccaagtgccccttgcccagactgggggcagtgactgattaactgggcaaagcctcaggatcacaggctccctccttgagggcaattaattattaacaaatggggacagagttcagagtaacggtaacgggaggcgaacccccaataa

SEQ ID NO: 4649 - DNA, 1825 bp, Macaca mulatta
  source 1..1825: mol_type = genomic DNA
cacgcacctataatcccagctacttgggagggggaggaagcaattgccacaaaagcggttaagtagctcgtcctggatcacaaagcccaatgtcctgaacccagggatccttgccccggagcccctgttttccccagcacgtggtgattacctagtaagtgcaggctgttgtgctgaggattgttgggggctgttattgggggttcgcctcccgttaccgttactctgaactctgtccccatttgttaataattaattgccctcaaggagcctgtgatcctgaggctttgcccagttaatcagtcactgcccccagtctgggcaaggggcacttggtgaacctgctgcctccagagcaccttccctggtgtggaggcagccagggacccaggatgctctggacctgttacccgctctgttcccaagctggtcccctggcgaggggctggcagcccctgagctttgatggtggcgccttccacctcaagggcacaggagagctgacacgggccttgctggttctccggctgtgtgcctggcccccactcgtcactcatgggctggcgctccaggcctggtctcagcgactcctgggctcccggctctcaggcgcgtttctccgagcatctgtctatgggcagtttgtggctggtgagacggcagaggaggtgaggggctgcgtgcagcagctgcggaccctcagcctccgaccactgctggcagtgcccactgaggaggagccggactctgctgccaagagcggtgaggcctggtatgaggggaacctcggtgctatgctgcggtgtgtggacctgtcgcgggacctcctggagccccccagcctggctgaggccagcctcatgcagctgaaggtgacggcgttgaccagcgctcggctctgtaaggagctagcctcatggatcagaaggccaggagctcccttggagctgagccccgagaggctggctgaagccatggactctgggcagaacctccaggtctcctgcctcaacgatgagcagaaccagcacctccaggcctccctcagccgcttgcatcgggtggcccagtatgcccgggcccagcacgtacggctcctggtggatgcggagtacacctcactgaaccctgcgctctcgctgctggtggctgccctggccgtgcgctggaacagcccaggggaaggcgggccctgggtgtggaacacctaccaggcctgtctaaaggacacattcgagcggctggggagggacgcagaggctgcacacagggccggcctggccttcggagtgaagctggtacgaggtgcctatctggacaaggagagagcggtggcccagcttcatgggatgaaggaccccactcagcctgactatgaggccaccagtcagagttacagccgctgcctggaactgatgctgacgcgtgtggcccgccatggccccatgtgccacctcatggtggcttcccacaatgaggaatctgttcgccaggcaaccaagcgcatgtgggagctgggcattcctctggacgggactgtctgttttggacaacttctgggcatgtgtgaccacgtttctctggcactggggcaggccggctatgtagtgtataagtccatcccctatggctccttggaggaggtaatcccctacctgatccggagggcccaggaaaaccggagcgtgcttcagggtgtccgcagggaacaggagctgctcagccaagaactgtggcggcggctgctgccaggacgccgaaggataccccactagcacccctgagggggtcatgtggtcaataaaagtccttaggcactgccaaa

SEQ ID NO: 4650 - DNA, 1825 bp, Macaca mulatta
  source 1..1825: mol_type = genomic DNA
tttggcagtgcctaaggacttttattgaccacatgaccccctcaggggtgctagtggggtatccttcggcgtcctggcagcagccgccgccacagttcttggctgagcagctcctgttccctgcggacaccctgaagcacgctccggttttcctgggccctccggatcaggtaggggattacctcctccaaggagccataggggatggacttatacactacatagccggcctgccccagtgccagagaaacgtggtcacacatgcccagaagttgtccaaaacagacagtcccgtccagaggaatgcccagctcccacatgcgcttggttgcctggcgaacagattcctcattgtgggaagccaccatgaggtggcacatggggccatggcgggccacacgcgtcagcatcagttccaggcagcggctgtaactctgactggtggcctcatagtcaggctgagtggggtccttcatcccatgaagctgggccaccgctctctccttgtccagataggcacctcgtaccagcttcactccgaaggccaggccggccctgtgtgcagcctctgcgtccctccccagccgctcgaatgtgtcctttagacaggcctggtaggtgttccacacccagggcccgccttcccctgggctgttccagcgcacggccagggcagccaccagcagcgagagcgcagggttcagtgaggtgtactccgcatccaccaggagccgtacgtgctgggcccgggcatactgggccacccgatgcaagcggctgagggaggcctggaggtgctggttctgctcatcgttgaggcaggagacctggaggttctgcccagagtccatggcttcagccagcctctcggggctcagctccaagggagctcctggccttctgatccatgaggctagctccttacagagccgagcgctggtcaacgccgtcaccttcagctgcatgaggctggcctcagccaggctggggggctccaggaggtcccgcgacaggtccacacaccgcagcatagcaccgaggttcccctcataccaggcctcaccgctcttggcagcagagtccggctcctcctcagtgggcactgccagcagtggtcggaggctgagggtccgcagctgctgcacgcagcccctcacctcctctgccgtctcaccagccacaaactgcccatagacagatgctcggagaaacgcgcctgagagccgggagcccaggagtcgctgagaccaggcctggagcgccagcccatgagtgacgagtgggggccaggcacacagccggagaaccagcaaggcccgtgtcagctctcctgtgcccttgaggtggaaggcgccaccatcaaagctcaggggctgccagcccctcgccaggggaccagcttgggaacagagcgggtaacaggtccagagcatcctgggtccctggctgcctccacaccagggaaggtgctctggaggcagcaggttcaccaagtgccccttgcccagactgggggcagtgactgattaactgggcaaagcctcaggatcacaggctccttgagggcaattaattattaacaaatggggacagagttcagagtaacggtaacgggaggcgaacccccaataacagcccccaacaatcctcagcacaacagcctgcacttactaggtaatcaccacgtgctggggaaaacaggggctccggggcaaggatccctgggttcaggacattgggctttgtgatccaggacgagctacttaaccgcttttgtggcaattgcttcctccccctcccaagtagctgggattataggtgcgtg

SEQ ID NO: 4651 - RNA, 21 nt, synthetic construct
  source 1..21: mol_type = other RNA
agaaccttccctggtgtggat

SEQ ID NO: 4652 - RNA, 21 nt, synthetic construct
  source 1..21: mol_type = other RNA
cttccctggtgtggaggcagt

SEQ ID NO: 4653 - RNA, 21 nt, synthetic construct
  source 1..21: mol_type = other RNA
caggatgctccggacctgttt

SEQ ID NO: 4654 - RNA, 21 nt, synthetic construct
  source 1..21: mol_type = other RNA
tgctccggacctgttacgtgt

SEQ ID NO: 4655 - RNA, 21 nt, synthetic construct
  source 1..21: mol_type = other RNA
gacctgttacgtgctctgttt

SEQ ID NO: 4656 - RNA, 21 nt, synthetic construct
  source 1..21: mol_type = other RNA
tacgtgctctgttcccaagct

SEQ ID NO: 4657 - RNA, 21 nt, synthetic construct
  source 1..21: mol_type = other RNA
gctctgttcccaagctggtct

SEQ ID NO: 4658 - RNA, 21 nt, synthetic construct
  source 1..21: mol_type = other RNA
ctggcagtccctgagctttgt

SEQ ID NO: 4659 - RNA, 21 nt, synthetic construct
  source 1..21: mol_type = other RNA
gtccctgagctttgatggcgt

SEQ ID NO: 4660 - RNA, 21 nt, synthetic construct
  source 1..21: mol_type = other RNA
gccttccaccttaagggcact

SEQ ID NO: 4661 - RNA, 21 nt, synthetic construct
  source 1..21: mol_type = other RNA
caccttaagggcacaggagat

SEQ ID NO: 4662 - RNA, 21 nt, synthetic construct
  source 1..21: mol_type = other RNA
gggcacaggagagctgacact

SEQ ID NO: 4663 - RNA, 21 nt, synthetic construct
  source 1..21: mol_type = other RNA
ggagagctgacacgggccttt

SEQ ID NO: 4664 - RNA, 21 nt, synthetic construct
  source 1..21: mol_type = other RNA
gacacgggccttgctggttct

SEQ ID NO: 4665 - RNA, 21 nt, synthetic construct
  source 1..21: mol_type = other RNA
cttgctggttctccggctgtt

SEQ ID NO: 4666 - RNA, 21 nt, synthetic construct
  source 1..21: mol_type = other RNA
ggttctccggctgtgtgcctt

SEQ ID NO: 4667 - RNA, 21 nt, synthetic construct
  source 1..21: mol_type = other RNA
ctcgtcactcacgggctgttt

SEQ ID NO: 4668 - RNA, 21 nt, synthetic construct
  source 1..21: mol_type = other RNA
ctcacgggctgttgctccagt

SEQ ID NO: 4669 - RNA, 21 nt, synthetic construct
  source 1..21: mol_type = other RNA
ttgctccaggcctggtctcgt

SEQ ID NO: 4670 - RNA, 21 nt, synthetic construct
  source 1..21: mol_type = other RNA
ggctctcaggcgcatttctct

SEQ ID NO: 4671 - RNA, 21 nt, synthetic construct
  source 1..21: mol_type = other RNA
tcaggcgcatttctccgagct

SEQ ID NO: 4672 - RNA, 21 nt, synthetic construct
  source 1..21: mol_type = other RNA
cgcatttctccgagcatccgt

SEQ ID NO: 4673 - RNA, 21 nt, synthetic construct
  source 1..21: mol_type = other RNA
ttctccgagcatccgtctatt

SEQ ID NO: 4674 - RNA, 21 nt, synthetic construct
  source 1..21: mol_type = other RNA
gagcatccgtctatgggcagt

SEQ ID NO: 4675 - RNA, 21 nt, synthetic construct
  source 1..21: mol_type = other RNA
tccgtctatgggcagtttgtt

SEQ ID NO: 4676 - RNA, 21 nt, synthetic construct
  source 1..21: mol_type = other RNA
tatgggcagtttgtggctggt

SEQ ID NO: 4677 - RNA, 21 nt, synthetic construct
  source 1..21: mol_type = other RNA
cagtttgtggctggtgagact

SEQ ID NO: 4678 - RNA, 21 nt, synthetic construct
  source 1..21: mol_type = other RNA
tggctggtgagacagcagagt

SEQ ID NO: 4679 - RNA, 21 nt, synthetic construct
  source 1..21: mol_type = other RNA
gtgagacagcagaggaggtgt

SEQ ID NO: 4680 - RNA, 21 nt, synthetic construct
  source 1..21: mol_type = other RNA
agcagaggaggtgaagggctt

SEQ ID NO: 4681 - RNA, 21 nt, synthetic construct
  source 1..21: mol_type = other RNA
gaggtgaagggctgcgtgcat

SEQ ID NO: 4682 - RNA, 21 nt, synthetic construct
  source 1..21: mol_type = other RNA
aagggctgcgtgcagcagctt

SEQ ID NO: 4683 - RNA, 21 nt, synthetic construct
  source 1..21: mol_type = other RNA
tgctggcagtgcccactgagt

SEQ ID NO: 4684 - RNA, 21 nt, synthetic construct
  source 1..21: mol_type = other RNA
gcagtgcccactgaggaggat

SEQ ID NO: 4685 - RNA, 21 nt, synthetic construct
  source 1..21: mol_type = other RNA
ctgaggaggagccggactctt

SEQ ID NO: 4686 - RNA, 21 nt, synthetic construct
  source 1..21: mol_type = other RNA
gagccggactctgctgccaat

SEQ ID NO: 4687 - RNA, 21 nt, synthetic construct
  source 1..21: mol_type = other RNA
actctgctgccaagagtggtt

SEQ ID NO: 4688 - RNA, 21 nt, synthetic construct
  source 1..21: mol_type = other RNA
gctgccaagagtggtgaggct

SEQ ID NO: 4689 - RNA, 21 nt, synthetic construct
  source 1..21: mol_type = other RNA
agtggtgaggcgtggtatgat

SEQ ID NO: 4690 - RNA, 21 nt, synthetic construct
  source 1..21: mol_type = other RNA
aacctcggtgctatgctgcgt

SEQ ID NO: 4691 - RNA, 21 nt, synthetic construct
  source 1..21: mol_type = other RNA
cggtgctatgctgcggtgtgt

SEQ ID NO: 4692 - RNA, 21 nt, synthetic construct
  source 1..21: mol_type = other RNA
ctatgctgcggtgtgtggact

SEQ ID NO: 4693 - RNA, 21 nt, synthetic construct
  source 1..21: mol_type = other RNA
cggtgtgtggacctgtcacgt

SEQ ID NO: 4694 - RNA, 21 nt, synthetic construct
  source 1..21: mol_type = other RNA
ggccagcctcatgcagctgat

SEQ ID NO: 4695 - RNA, 21 nt, synthetic construct
  source 1..21: mol_type = other RNA
gcctcatgcagctgaaggtgt

SEQ ID NO: 4696 - RNA, 21 nt, synthetic construct
  source 1..21: mol_type = other RNA
atgcagctgaaggtgacggct

SEQ ID NO: 4697 - RNA, 21 nt, synthetic construct
  source 1..21: mol_type = other RNA
gctgaaggtgacggcgctgat

SEQ ID NO: 4698 - RNA, 21 nt, synthetic construct
  source 1..21: mol_type = other RNA
ggtgacggcgctgaccagtat

SEQ ID NO: 4699 - RNA, 21 nt, synthetic construct
  source 1..21: mol_type = other RNA
gctgaccagtactcggctctt

SEQ ID NO: 4700 - RNA, 21 nt, synthetic construct
  source 1..21: mol_type = other RNA
agtactcggctctgtaaggat

SEQ ID NO: 4701 - RNA, 21 nt, synthetic construct
  source 1..21: mol_type = other RNA
tcggctctgtaaggagctagt

SEQ ID NO: 4702 - RNA, 21 nt, synthetic construct
  source 1..21: mol_type = other RNA
ctgtaaggagctagcctcgtt

SEQ ID NO: 4703 - RNA, 21 nt, synthetic construct
  source 1..21: mol_type = other RNA
aggagctagcctcgtgggtct

SEQ ID NO: 4704 - RNA, 21 nt, synthetic construct
  source 1..21: mol_type = other RNA
agcctcgtgggtcagaaggct

SEQ ID NO: 4705 - RNA, 21 nt, synthetic construct
  source 1..21: mol_type = other RNA
gtgggtcagaaggccaggagt

SEQ ID NO: 4706 - RNA, 21 nt, synthetic construct
  source 1..21: mol_type = other RNA
ggccaggagcctccttggagt

SEQ ID NO: 4707 - RNA, 21 nt, synthetic construct
  source 1..21: mol_type = other RNA
ggagcctccttggagctgagt

SEQ ID NO: 4708 - RNA, 21 nt, synthetic construct
  source 1..21: mol_type = other RNA
gagaggctggctgaagctatt

SEQ ID NO: 4709 - RNA, 21 nt, synthetic construct
  source 1..21: mol_type = other RNA
ggctgaagctatggactctgt

SEQ ID NO: 4710 - RNA, 21 nt, synthetic construct
  source 1..21: mol_type = other RNA
gctatggactctgggcagaat

SEQ ID NO: 4711 - RNA, 21 nt, synthetic construct
  source 1..21: mol_type = other RNA
ctctgggcagaacctccaggt

SEQ ID NO: 4712 - RNA, 21 nt, synthetic construct
  source 1..21: mol_type = other RNA
gaacctccaggtctcctgcct

SEQ ID NO: 4713 - RNA, 21 nt, synthetic construct
  source 1..21: mol_type = other RNA
tccaggtctcctgcctcaatt

SEQ ID NO: 4714 - RNA, 21 nt, synthetic construct
  source 1..21: mol_type = other RNA
tcctgcctcaatgctgagcat

SEQ ID NO: 4715 - RNA, 21 nt, synthetic construct
  source 1..21: mol_type = other RNA
tcaatgctgagcagaaccagt

SEQ ID NO: 4716 - RNA, 21 nt, synthetic construct
  source 1..21: mol_type = other RNA
gctgagcagaaccagcacctt

SEQ ID NO: 4717 - RNA, 21 nt, synthetic construct
  source 1..21: mol_type = other RNA
gcatcgggtggcacagtatgt

SEQ ID NO: 4718 - RNA, 21 nt, synthetic construct
  source 1..21: mol_type = other RNA
ctcctggtggatgcggagtat

SEQ ID NO: 4719 - RNA, 21 nt, synthetic construct
  source 1..21: mol_type = other RNA
tggatgcggagtacacctcat

SEQ ID NO: 4720 - RNA, 21 nt, synthetic construct
  source 1..21: mol_type = other RNA
gcggagtacacctcactgaat

SEQ ID NO: 4721 - RNA, 21 nt, synthetic construct
  source 1..21: mol_type = other RNA
gtacacctcactgaaccctgt

SEQ ID NO: 4722 - RNA, 21 nt, synthetic construct
  source 1..21: mol_type = other RNA
tcactgaaccctgcgctctct

SEQ ID NO: 4723 - RNA, 21 nt, synthetic construct
  source 1..21: mol_type = other RNA
aaccctgcgctctcgctgctt

SEQ ID NO: 4724 - RNA, 21 nt, synthetic construct
  source 1..21: mol_type = other RNA
ccctgggtgtggaacacctat

SEQ ID NO: 4725 - RNA, 21 nt, synthetic construct
  source 1..21: mol_type = other RNA
ggtgtggaacacctaccaggt

SEQ ID NO: 4726 - RNA, 21 nt, synthetic construct
  source 1..21: mol_type = other RNA
acctaccaggcctgtctaaat

SEQ ID NO: 4727 - RNA, 21 nt, synthetic construct
  source 1..21: mol_type = other RNA
gcctgtctaaaggacacattt

SEQ ID NO: 4728 - RNA, 21 nt, synthetic construct
  source 1..21: mol_type = other RNA
tctaaaggacacattcgagct

SEQ ID NO: 4729 - RNA, 21 nt, synthetic construct
  source 1..21: mol_type = other RNA
ggacacattcgagcggctggt

SEQ ID NO: 4730 - RNA, 21 nt, synthetic construct
  source 1..21: mol_type = other RNA
ggccttcggagtgaagctggt

SEQ ID NO: 4731 - RNA, 21 nt, synthetic construct
  source 1..21: mol_type = other RNA
cggagtgaagctggtacgagt

SEQ ID NO: 4732 - RNA, 21 nt, synthetic construct
  source 1..21: mol_type = other RNA
tgaagctggtacgaggtgcat

SEQ ID NO: 4733 - RNA, 21 nt, synthetic construct
  source 1..21: mol_type = other RNA
ctggtacgaggtgcatatctt

SEQ ID NO: 4734 - RNA, 21 nt, synthetic construct
  source 1..21: mol_type = other RNA
gaggtgcatatctggacaagt

SEQ ID NO: 4735 - RNA, 21 nt, synthetic construct
  source 1..21: mol_type = other RNA
catatctggacaaggagagat

SEQ ID NO: 4736 - RNA, 21 nt, synthetic construct
  source 1..21: mol_type = other RNA
ctggacaaggagagagcggtt

SEQ ID NO: 4737 - RNA, 21 nt, synthetic construct
  source 1..21: mol_type = other RNA
gcccagctccatgggatggat

SEQ ID NO: 4738 - RNA, 21 nt, synthetic construct
  source 1..21: mol_type = other RNA
gctccatgggatggaagacct

SEQ ID NO: 4739 - RNA, 21 nt, synthetic construct
  source 1..21: mol_type = other RNA
ctcagcctgactatgaggcct

SEQ ID NO: 4740 - RNA, 21 nt, synthetic construct
  source 1..21: mol_type = other RNA
gactatgaggccaccagtcat

SEQ ID NO: 4741 - RNA, 21 nt, synthetic construct
  source 1..21: mol_type = other RNA
gaggccaccagtcagagttat

SEQ ID NO: 4742 - RNA, 21 nt, synthetic construct
  source 1..21: mol_type = other RNA
accagtcagagttacagccgt

SEQ ID NO: 4743 - RNA, 21 nt, synthetic construct
  source 1..21: mol_type = other RNA
tcagagttacagccgctgcct

SEQ ID NO: 4744 - RNA, 21 nt, synthetic construct
  source 1..21: mol_type = other RNA
cagccgctgcctggaactgat

SEQ ID NO: 4745 - RNA, 21 nt, synthetic construct
  source 1..21: mol_type = other RNA
gctgcctggaactgatgctgt

SEQ ID NO: 4746 - RNA, 21 nt, synthetic construct
  source 1..21: mol_type = other RNA
ggaactgatgctgacgcacgt

SEQ ID NO: 4747 - RNA, 21 nt, synthetic construct
  source 1..21: mol_type = other RNA
tgatgctgacgcacgtggcct

SEQ ID NO: 4748 - RNA, 21 nt, synthetic construct
  source 1..21: mol_type = other RNA
catgtgccacctcatggtggt

SEQ ID NO: 4749 - RNA, 21 nt, synthetic construct
  source 1..21: mol_type = other RNA
ctcatggtggcttcccacaat

SEQ ID NO: 4750 - RNA, 21 nt, synthetic construct
  source 1..21: mol_type = other RNA
ggcttcccacaatgaggaatt

SEQ ID NO: 4751 - RNA, 21 nt, synthetic construct
  source 1..21: mol_type = other RNA
cccacaatgaggaatctgttt

SEQ ID NO: 4752 - RNA, 21 nt, synthetic construct
  source 1..21: mol_type = other RNA
aatgaggaatctgttcgccat

SEQ ID NO: 4753 - RNA, 21 nt, synthetic construct
  source 1..21: mol_type = other RNA
tctgttcgccaggcaaccaat

SEQ ID NO: 4754 - RNA, 21 nt, synthetic construct
  source 1..21: mol_type = other RNA
tcgccaggcaaccaagcgcat

SEQ ID NO: 4755 - RNA, 21 nt, synthetic construct
  source 1..21: mol_type = other RNA
gcaaccaagcgcatgtgggat

SEQ ID NO: 4756 - RNA, 21 nt, synthetic construct
  source 1..21: mol_type = other RNA
caagcgcatgtgggagctggt

SEQ ID NO: 4757 - RNA, 21 nt, synthetic construct
  source 1..21: mol_type = other RNA
gcatgtgggagctgggcattt

SEQ ID NO: 4758 - RNA, 21 nt, synthetic construct
  source 1..21: mol_type = other RNA
tgggagctgggcattcctctt

SEQ ID NO: 4759 - RNA, 21 nt, synthetic construct
  source 1..21: mol_type = other RNA
gggcattcctctggatgggat

SEQ ID NO: 4760 - RNA, 21 nt, synthetic construct
  source 1..21: mol_type = other RNA
ttcctctggatgggactgtct

SEQ ID NO: 4761 - RNA, 21 nt, synthetic construct
  source 1..21: mol_type = other RNA
ctggatgggactgtctgtttt

SEQ ID NO: 4762 - RNA, 21 nt, synthetic construct
  source 1..21: mol_type = other RNA
tgggactgtctgtttcggact

SEQ ID NO: 4763 - RNA, 21 nt, synthetic construct
  source 1..21: mol_type = other RNA
ctgtctgtttcggacaacttt

SEQ ID NO: 4764 - RNA, 21 nt, synthetic construct
  source 1..21: mol_type = other RNA
ttcggacaacttctgggcatt

SEQ ID NO: 4765 - RNA, 21 nt, synthetic construct
  source 1..21: mol_type = other RNA
cttctgggcatgtgtgaccat

SEQ ID NO: 4766 - RNA, 21 nt, synthetic construct
  source 1..21: mol_type = other RNA
atgtgtgaccacgtctctctt

SEQ ID NO: 4767 - RNA, 21 nt, synthetic construct
  source 1..21: mol_type = other RNA
gaccacgtctctctagcactt

SEQ ID NO: 4768 - RNA, 21 nt, synthetic construct
  source 1..21: mol_type = other RNA
gcaggccggctatgtagtgtt

SEQ ID NO: 4769 - RNA, 21 nt, synthetic construct
  source 1..21: mol_type = other RNA
ccggctatgtagtgtataagt

SEQ ID NO: 4770 - RNA, 21 nt, synthetic construct
  source 1..21: mol_type = other RNA
atgtagtgtataagtccattt

SEQ ID NO: 4771 - RNA, 21 nt, synthetic construct
  source 1..21: mol_type = other RNA
gtgtataagtccattccctat

SEQ ID NO: 4772 - RNA, 21 nt, synthetic construct
  source 1..21: mol_type = other RNA
aagtccattccctatggctct

SEQ ID NO: 4773 - RNA, 21 nt, synthetic construct
  source 1..21: mol_type = other RNA
ttccctatggctccttggagt

SEQ ID NO: 4774 - RNA, 21 nt, synthetic construct
  source 1..21: mol_type = other RNA
ggctccttggaggaggtaatt

SEQ ID NO: 4775 - RNA, 21 nt, synthetic construct
  source 1..21: mol_type = other RNA
atccggagggcccaggagaat

SEQ ID NO: 4776 - RNA, 21 nt, synthetic construct
  source 1..21: mol_type = other RNA
gaaccggagcgtgcttcaggt

SEQ ID NO: 4777 - RNA, 21 nt, synthetic construct
  source 1..21: mol_type = other RNA
cagggtgcccgcagggaacat

SEQ ID NO: 4778 - RNA, 21 nt, synthetic construct
  source 1..21: mol_type = other RNA
cagggaacaggagctgctcat

SEQ ID NO: 4779 - RNA, 21 nt, synthetic construct
  source 1..21: mol_type = other RNA
aacaggagctgctcagccaat

SEQ ID NO: 4780 - RNA, 21 nt, synthetic construct
  source 1..21: mol_type = other RNA
gagctgctcagccaagaactt

SEQ ID NO: 4781 - RNA, 21 nt, synthetic construct
  source 1..21: mol_type = other RNA
gctcagccaagaactgtggct

SEQ ID NO: 4782 - RNA, 21 nt, synthetic construct
  source 1..21: mol_type = other RNA
tgccaggatgccgaaggatat

SEQ ID NO: 4783 - RNA, 21 nt, synthetic construct
  source 1..21: mol_type = other RNA
tcatgtggtcaataaaagtct

SEQ ID NO: 4784 - RNA, 21 nt, synthetic construct
  source 1..21: mol_type = other RNA
tcaataaaagtccttaggtgt

SEQ ID NO: 4785 - RNA, 21 nt, synthetic construct
  source 1..21: mol_type = other RNA
aaaagtccttaggtgctgcct

SEQ ID NO: 4786 - RNA, 23 nt, synthetic construct
  source 1..23: mol_type = other RNA
atccacaccagggaaggttctct

SEQ ID NO: 4787 - RNA, 23 nt, synthetic construct
  source 1..23: mol_type = other RNA
actgcctccacaccagggaaggt

SEQ ID NO: 4788 - RNA, 23 nt, synthetic construct
  source 1..23: mol_type = other RNA
aaacaggtccggagcatcctggg

SEQ ID NO: 4789 - RNA, 23 nt, synthetic construct
  source 1..23: mol_type = other RNA
acacgtaacaggtccggagcatc

SEQ ID NO: 4790 - RNA, 23 nt, synthetic construct
  source 1..23: mol_type = other RNA
aaacagagcacgtaacaggtccg

SEQ ID NO: 4791 - RNA, 23 nt, synthetic construct
  source 1..23: mol_type = other RNA
agcttgggaacagagcacgtaac

SEQ ID NO: 4792 - RNA, 23 nt, synthetic construct
  source 1..23: mol_type = other RNA
agaccagcttgggaacagagcac

SEQ ID NO: 4793 - RNA, 23 nt, synthetic construct
  source 1..23: mol_type = other RNA
acaaagctcagggactgccagcc

SEQ ID NO: 4794 - RNA, 23 nt, synthetic construct
  source 1..23: mol_type = other RNA
acgccatcaaagctcagggactg

SEQ ID NO: 4795 - RNA, 23 nt, synthetic construct
  source 1..23: mol_type = other RNA
agtgcccttaaggtggaaggccc

SEQ ID NO: 4796 - RNA, 23 nt, synthetic construct
  source 1..23: mol_type = other RNA
atctcctgtgcccttaaggtgga

SEQ ID NO: 4797 - RNA, 23 nt, synthetic construct
  source 1..23: mol_type = other RNA
agtgtcagctctcctgtgccctt

SEQ ID NO: 4798 - RNA, 23 nt, synthetic construct
  source 1..23: mol_type = other RNA
aaaggcccgtgtcagctctcctg

SEQ ID NO: 4799 - RNA, 23 nt, synthetic construct
  source 1..23: mol_type = other RNA
agaaccagcaaggcccgtgtcag

SEQ ID NO: 4800 - RNA, 23 nt, synthetic construct
  source 1..23: mol_type = other RNA
aacagccggagaaccagcaaggc

SEQ ID NO: 4801 - RNA, 23 nt, synthetic construct
  source 1..23: mol_type = other RNA
aaggcacacagccggagaaccag

SEQ ID NO: 4802 - RNA, 23 nt, synthetic construct
  source 1..23: mol_type = other RNA
aaacagcccgtgagtgacgagtg

SEQ ID NO: 4803 - RNA, 23 nt, synthetic construct
  source 1..23: mol_type = other RNA
actggagcaacagcccgtgagtg

SEQ ID NO: 4804 - RNA, 23 nt, synthetic construct
  source 1..23: mol_type = other RNA
acgagaccaggcctggagcaaca

SEQ ID NO: 4805 - RNA, 23 nt, synthetic construct
  source 1..23: mol_type = other RNA
agagaaatgcgcctgagagccgg

SEQ ID NO: 4806 - RNA, 23 nt, synthetic construct
  source 1..23: mol_type = other RNA
agctcggagaaatgcgcctgaga

SEQ ID NO: 4807 - RNA, 23 nt, synthetic construct
  source 1..23: mol_type = other RNA
acggatgctcggagaaatgcgcc

SEQ ID NO: 4808 - RNA, 23 nt, synthetic construct
  source 1..23: mol_type = other RNA
aatagacggatgctcggagaaat

SEQ ID NO: 4809 - RNA, 23 nt, synthetic construct
  source 1..23: mol_type = other RNA
actgcccatagacggatgctcgg

SEQ ID NO: 4810 - RNA, 23 nt, synthetic construct
  source 1..23: mol_type = other RNA
aacaaactgcccatagacggatg

SEQ ID NO: 4811 - RNA, 23 nt, synthetic construct
  source 1..23: mol_type = other RNA
accagccacaaactgcccataga

SEQ ID NO: 4812 - RNA, 23 nt, synthetic construct
  source 1..23: mol_type = other RNA
agtctcaccagccacaaactgcc

SEQ ID NO: 4813 - RNA, 23 nt, synthetic construct
  source 1..23: mol_type = other RNA
actctgctgtctcaccagccaca

SEQ ID NO: 4814 - RNA, 23 nt, synthetic construct
  source 1..23: mol_type = other RNA
acacctcctctgctgtctcacca

SEQ ID NO: 4815 - RNA, 23 nt, synthetic construct
  source 1..23: mol_type = other RNA
aagcccttcacctcctctgctgt

SEQ ID NO: 4816 - RNA, 23 nt, synthetic construct
  source 1..23: mol_type = other RNA
atgcacgcagcccttcacctcct

SEQ ID NO: 4817 - RNA, 23 nt, synthetic construct
  source 1..23: mol_type = other RNA
aagctgctgcacgcagcccttca

SEQ ID NO: 4818 - RNA, 23 nt, synthetic construct
  source 1..23: mol_type = other RNA
actcagtgggcactgccagcagt

SEQ ID NO: 4819 - RNA, 23 nt, synthetic construct
  source 1..23: mol_type = other RNA
atcctcctcagtgggcactgcca

SEQ ID NO: 4820 - RNA, 23 nt, synthetic construct
  source 1..23: mol_type = other RNA
aagagtccggctcctcctcagtg

SEQ ID NO: 4821 - RNA, 23 nt, synthetic construct
  source 1..23: mol_type = other RNA
attggcagcagagtccggctcct

SEQ ID NO: 4822 - RNA, 23 nt, synthetic construct
  source 1..23: mol_type = other RNA
aaccactcttggcagcagagtcc

SEQ ID NO: 4823 - RNA, 23 nt, synthetic construct
  source 1..23: mol_type = other RNA
agcctcaccactcttggcagcag

SEQ ID NO: 4824 - RNA, 23 nt, synthetic construct
  source 1..23: mol_type = other RNA
atcataccacgcctcaccactct

SEQ ID NO: 4825 - RNA, 23 nt, synthetic construct
  source 1..23: mol_type = other RNA
acgcagcatagcaccgaggttcc

SEQ ID NO: 4826 - RNA, 23 nt, synthetic construct
  source 1..23: mol_type = other RNA
acacaccgcagcatagcaccgag

SEQ ID NO: 4827 - RNA, 23 nt, synthetic construct
  source 1..23: mol_type = other RNA
agtccacacaccgcagcatagca

SEQ ID NO: 4828 - RNA, 23 nt, synthetic construct
  source 1..23: mol_type = other RNA
acgtgacaggtccacacaccgca

SEQ ID NO: 4829 - RNA, 23 nt, synthetic construct
  source 1..23: mol_type = other RNA
atcagctgcatgaggctggcctc

SEQ ID NO: 4830 - RNA, 23 nt, synthetic construct
  source 1..23: mol_type = other RNA
acaccttcagctgcatgaggctg

SEQ ID NO: 4831 - RNA, 23 nt, synthetic construct
  source 1..23: mol_type = other RNA
agccgtcaccttcagctgcatga

SEQ ID NO: 4832 - RNA, 23 nt, synthetic construct
  source 1..23: mol_type = other RNA
atcagcgccgtcaccttcagctg

SEQ ID NO: 4833 - RNA, 23 nt, synthetic construct
  source 1..23: mol_type = other RNA
atactggtcagcgccgtcacctt

SEQ ID NO: 4834 - RNA, 23 nt, synthetic construct
  source 1..23: mol_type = other RNA
aagagccgagtactggtcagcgc

SEQ ID NO: 4835 - RNA, 23 nt, synthetic construct
  source 1..23: mol_type = other RNA
atccttacagagccgagtactgg

SEQ ID NO: 4836 - RNA, 23 nt, synthetic construct
  source 1..23: mol_type = other RNA
actagctccttacagagccgagt

SEQ ID NO: 4837 - RNA, 23 nt, synthetic construct
  source 1..23: mol_type = other RNA
aacgaggctagctccttacagag

SEQ ID NO: 4838 - RNA, 23 nt, synthetic construct
  source 1..23: mol_type = other RNA
agacccacgaggctagctcctta

SEQ ID NO: 4839 - RNA, 23 nt, synthetic construct
  source 1..23: mol_type = other RNA
agccttctgacccacgaggctag

SEQ ID NO: 4840 - RNA, 23 nt, synthetic construct
  source 1..23: mol_type = other RNA
actcctggccttctgacccacga

SEQ ID NO: 4841 - RNA, 23 nt, synthetic construct
  source 1..23: mol_type = other RNA
actccaaggaggctcctggcctt

SEQ ID NO: 4842 - RNA, 23 nt, synthetic construct
  source 1..23: mol_type = other RNA
actcagctccaaggaggctcctg

SEQ ID NO: 4843 - RNA, 23 nt, synthetic construct
  source 1..23: mol_type = other RNA
aatagcttcagccagcctctcgg

SEQ ID NO: 4844 - RNA, 23 nt, synthetic construct
  source 1..23: mol_type = other RNA
acagagtccatagcttcagccag

SEQ ID NO: 4845 - RNA, 23 nt, synthetic construct
  source 1..23: mol_type = other RNA
attctgcccagagtccatagctt

SEQ ID NO: 4846 - RNA, 23 nt, synthetic construct
  source 1..23: mol_type = other RNA
acctggaggttctgcccagagtc

SEQ ID NO: 4847 - RNA, 23 nt, synthetic construct
  source 1..23: mol_type = other RNA
aggcaggagacctggaggttctg

SEQ ID NO: 4848 - RNA, 23 nt, synthetic construct
  source 1..23: mol_type = other RNA
aattgaggcaggagacctggagg

SEQ ID NO: 4849 - RNA, 23 nt, synthetic construct
  source 1..23: mol_type = other RNA
atgctcagcattgaggcaggaga

SEQ ID NO: 4850 - RNA, 23 nt, synthetic construct
  source 1..23: mol_type = other RNA
actggttctgctcagcattgagg

SEQ ID NO: 4851 - RNA, 23 nt, synthetic construct
  source 1..23: mol_type = other RNA
aaggtgctggttctgctcagcat

SEQ ID NO: 4852 - RNA, 23 nt, synthetic construct
  source 1..23: mol_type = other RNA
acatactgtgccacccgatgcag

SEQ ID NO: 4853 - RNA, 23 nt, synthetic construct
  source 1..23: mol_type = other RNA
atactccgcatccaccaggagcc

SEQ ID NO: 4854 - RNA, 23 nt, synthetic construct
  source 1..23: mol_type = other RNA
atgaggtgtactccgcatccacc

SEQ ID NO: 4855 - RNA, 23 nt, synthetic construct
  source 1..23: mol_type = other RNA
attcagtgaggtgtactccgcat

SEQ ID NO: 4856 - RNA, 23 nt, synthetic construct
  source 1..23: mol_type = other RNA
acagggttcagtgaggtgtactc

SEQ ID NO: 4857 - RNA, 23 nt, synthetic construct
  source 1..23: mol_type = other RNA
agagagcgcagggttcagtgagg

SEQ ID NO: 4858 - RNA, 23 nt, synthetic construct
  source 1..23: mol_type = other RNA
aagcagcgagagcgcagggttca

SEQ ID NO: 4859 - RNA, 23 nt, synthetic construct
  source 1..23: mol_type = other RNA
ataggtgttccacacccagggcc

SEQ ID NO: 4860 - RNA, 23 nt, synthetic construct
  source 1..23: mol_type = other RNA
acctggtaggtgttccacaccca

SEQ ID NO: 4861 - RNA, 23 nt, synthetic construct
  source 1..23: mol_type = other RNA
atttagacaggcctggtaggtgt

SEQ ID NO: 4862 - RNA, 23 nt, synthetic construct
  source 1..23: mol_type = other RNA
aaatgtgtcctttagacaggcct

SEQ ID NO: 4863 - RNA, 23 nt, synthetic construct
  source 1..23: mol_type = other RNA
agctcgaatgtgtcctttagaca

SEQ ID NO: 4864 - RNA, 23 nt, synthetic construct
  source 1..23: mol_type = other RNA
accagccgctcgaatgtgtcctt

SEQ ID NO: 4865 - RNA, 23 nt, synthetic construct
  source 1..23: mol_type = other RNA
accagcttcactccgaaggccag

SEQ ID NO: 4866 - RNA, 23 nt, synthetic construct
  source 1..23: mol_type = other RNA
actcgtaccagcttcactccgaa

SEQ ID NO: 4867 - RNA, 23 nt, synthetic construct
  source 1..23: mol_type = other RNA
atgcacctcgtaccagcttcact

SEQ ID NO: 4868 - RNA, 23 nt, synthetic construct
  source 1..23: mol_type = other RNA
aagatatgcacctcgtaccagct

SEQ ID NO: 4869 - RNA, 23 nt, synthetic construct
  source 1..23: mol_type = other RNA
acttgtccagatatgcacctcgt

SEQ ID NO: 4870 - RNA, 23 nt, synthetic construct
  source 1..23: mol_type = other RNA
atctctccttgtccagatatgca

SEQ ID NO: 4871 - RNA, 23 nt, synthetic construct
  source 1..23: mol_type = other RNA
aaccgctctctccttgtccagat

SEQ ID NO: 4872 - RNA, 23 nt, synthetic construct
  source 1..23: mol_type = other RNA
atccatcccatggagctgggcca

SEQ ID NO: 4873 - RNA, 23 nt, synthetic construct
  source 1..23: mol_type = other RNA
aggtcttccatcccatggagctg

SEQ ID NO: 4874 - RNA, 23 nt, synthetic construct
  source 1..23: mol_type = other RNA
aggcctcatagtcaggctgagtg

SEQ ID NO: 4875 - RNA, 23 nt, synthetic construct
  source 1..23: mol_type = other RNA
atgactggtggcctcatagtcag

SEQ ID NO: 4876 - RNA, 23 nt, synthetic construct
  source 1..23: mol_type = other RNA
ataactctgactggtggcctcat

SEQ ID NO: 4877 - RNA, 23 nt, synthetic construct
  source 1..23: mol_type = other RNA
acggctgtaactctgactggtgg

SEQ ID NO: 4878 - RNA, 23 nt, synthetic construct
  source 1..23: mol_type = other RNA
aggcagcggctgtaactctgact

SEQ ID NO: 4879 - RNA, 23 nt, synthetic construct
  source 1..23: mol_type = other RNA
atcagttccaggcagcggctgta

SEQ ID NO: 4880 - RNA, 23 nt, synthetic construct
  source 1..23: mol_type = other RNA
acagcatcagttccaggcagcgg

SEQ ID NO: 4881 - RNA, 23 nt, synthetic construct
  source 1..23: mol_type = other RNA
acgtgcgtcagcatcagttccag

SEQ ID NO: 4882 - RNA, 23 nt, synthetic construct
  source 1..23: mol_type = other RNA
aggccacgtgcgtcagcatcagt

SEQ ID NO: 4883 - RNA, 23 nt, synthetic construct
  source 1..23: mol_type = other RNA
accaccatgaggtggcacatggg

SEQ ID NO: 4884 - RNA, 23 nt, synthetic construct
  source 1..23: mol_type = other RNA
attgtgggaagccaccatgaggt

SEQ ID NO: 4885 - RNA, 23 nt, synthetic construct
  source 1..23: mol_type = other RNA
aattcctcattgtgggaagccac

SEQ ID NO: 4886 - RNA, 23 nt, synthetic construct
  source 1..23: mol_type = other RNA
aaacagattcctcattgtgggaa

SEQ ID NO: 4887 - RNA, 23 nt, synthetic construct
  source 1..23: mol_type = other RNA
atggcgaacagattcctcattgt

SEQ ID NO: 4888 - RNA, 23 nt, synthetic construct
  source 1..23: mol_type = other RNA
attggttgcctggcgaacagatt

SEQ ID NO: 4889 - RNA, 23 nt, synthetic construct
  source 1..23: mol_type = other RNA
atgcgcttggttgcctggcgaac

SEQ ID NO: 4890 - RNA, 23 nt, synthetic construct
  source 1..23: mol_type = other RNA
atcccacatgcgcttggttgcct

SEQ ID NO: 4891 - RNA, 23 nt, synthetic construct
  source 1..23: mol_type = other RNA
accagctcccacatgcgcttggt

SEQ ID NO: 4892 - RNA, 23 nt, synthetic construct
  source 1..23: mol_type = other RNA
aaatgcccagctcccacatgcgc

SEQ ID NO: 4893 - RNA, 23 nt, synthetic construct
  source 1..23: mol_type = other RNA
aagaggaatgcccagctcccaca

SEQ ID NO: 4894 - RNA, 23 nt, synthetic construct
  source 1..23: mol_type = other RNA
atcccatccagaggaatgcccag

SEQ ID NO: 4895 - RNA, 23 nt, synthetic construct
  source 1..23: mol_type = other RNA
agacagtcccatccagaggaatg

SEQ ID NO: 4896 - RNA, 23 nt, synthetic construct
  source 1..23: mol_type = other RNA
aaaacagacagtcccatccagag

SEQ ID NO: 4897 - RNA, 23 nt, synthetic construct
  source 1..23: mol_type = other RNA
agtccgaaacagacagtcccatc

SEQ ID NO: 4898 - RNA, 23 nt, synthetic construct
  source 1..23: mol_type = other RNA
aaagttgtccgaaacagacagtc

SEQ ID NO: 4899 - RNA, 23 nt, synthetic construct
  source 1..23: mol_type = other RNA
aatgcccagaagttgtccgaaac

SEQ ID NO: 4900 - RNA, 23 nt, synthetic construct
  source 1..23: mol_type = other RNA
atggtcacacatgcccagaagtt

SEQ ID NO: 4901 - RNA, 23 nt, synthetic construct
  source 1..23: mol_type = other RNA
aagagagacgtggtcacacatgc

SEQ ID NO: 4902 - RNA, 23 nt, synthetic construct
  source 1..23: mol_type = other RNA
aagtgctagagagacgtggtcac

SEQ ID NO: 4903 - RNA, 23 nt, synthetic construct
  source 1..23: mol_type = other RNA
aacactacatagccggcctgccc

SEQ ID NO: 4904 - RNA, 23 nt, synthetic construct
  source 1..23: mol_type = other RNA
acttatacactacatagccggcc

SEQ ID NO: 4905 - RNA, 23 nt, synthetic construct
  source 1..23: mol_type = other RNA
aaatggacttatacactacatag

SEQ ID NO: 4906 - RNA, 23 nt, synthetic construct
  source 1..23: mol_type = other RNA
atagggaatggacttatacacta

SEQ ID NO: 4907 - RNA, 23 nt, synthetic construct
  source 1..23: mol_type = other RNA
agagccatagggaatggacttat

SEQ ID NO: 4908 - RNA, 23 nt, synthetic construct
  source 1..23: mol_type = other RNA
actccaaggagccatagggaatg

SEQ ID NO: 4909 - RNA, 23 nt, synthetic construct
  source 1..23: mol_type = other RNA
aattacctcctccaaggagccat

SEQ ID NO: 4910 - RNA, 23 nt, synthetic construct
  source 1..23: mol_type = other RNA
attctcctgggccctccggatca

SEQ ID NO: 4911 - RNA, 23 nt, synthetic construct
  source 1..23: mol_type = other RNA
acctgaagcacgctccggttctc

SEQ ID NO: 4912 - RNA, 23 nt, synthetic construct
  source 1..23: mol_type = other RNA
atgttccctgcgggcaccctgaa

SEQ ID NO: 4913 - RNA, 23 nt, synthetic construct
  source 1..23: mol_type = other RNA
atgagcagctcctgttccctgcg

SEQ ID NO: 4914 - RNA, 23 nt, synthetic construct
  source 1..23: mol_type = other RNA
attggctgagcagctcctgttcc

SEQ ID NO: 4915 - RNA, 23 nt, synthetic construct
  source 1..23: mol_type = other RNA
aagttcttggctgagcagctcct

SEQ ID NO: 4916 - RNA, 23 nt, synthetic construct
  source 1..23: mol_type = other RNA
agccacagttcttggctgagcag

SEQ ID NO: 4917 - RNA, 23 nt, synthetic construct
  source 1..23: mol_type = other RNA
atatccttcggcatcctggcagc

SEQ ID NO: 4918 - RNA, 23 nt, synthetic construct
  source 1..23: mol_type = other RNA
agacttttattgaccacatgacc

SEQ ID NO: 4919 - RNA, 23 nt, synthetic construct
  source 1..23: mol_type = other RNA
acacctaaggacttttattgacc

SEQ ID NO: 4920 - RNA, 23 nt, synthetic construct
  source 1..23: mol_type = other RNA
aggcagcacctaaggacttttat

SEQ ID NO: 4921 - RNA, 21 nt, synthetic construct
  source 1..21: mol_type = other RNA
  modified_base 1: mod_base = OTHER; note = 2'-O-methyladenosine-3'- phosphorothioate
  modified_base 2: mod_base = OTHER; note = 2'-O-methylguanosine-3'- phosphorothioate
  modified_base 3: mod_base = OTHER; note = 2'-O-methyladenosine-3'-phosphate
  modified_base 4: mod_base = OTHER; note = 2'-O-methyladenosine-3'-phosphate
  modified_base 5: mod_base = OTHER; note = 2'-O-methylcytidine-3'-phosphate
  modified_base 6: mod_base = OTHER; note = 2'-O-methylcytidine-3'-phosphate
  modified_base 7: mod_base = OTHER; note = 2'-fluorouridine-3'-phosphate
  modified_base 8: mod_base = OTHER; note = 2'-O-methyluridine-3'-phosphate
  modified_base 9: mod_base = OTHER; note = 2'-fluorocytidine-3'-phosphate
  modified_base 10: mod_base = OTHER; note = 2'-fluorocytidine-3'-phosphate
  modified_base 11: mod_base = OTHER; note = 2'-fluorocytidine-3'-phosphate
  modified_base 12: mod_base = OTHER; note = 2'-O-methyluridine-3'-phosphate
  modified_base 13: mod_base = OTHER; note = 2'-O-methylguanosine-3'-phosphate
  modified_base 14: mod_base = OTHER; note = 2'-O-methylguanosine-3'-phosphate
  modified_base 15: mod_base = OTHER; note = 2'-O-methyluridine-3'-phosphate
  modified_base 16: mod_base = OTHER; note = 2'-O-methylguanosine-3'-phosphate
  modified_base 17: mod_base = OTHER; note = 2'-O-methyluridine-3'-phosphate
  modified_base 18: mod_base = OTHER; note = 2'-O-methylguanosine-3'-phosphate
  modified_base 19: mod_base = OTHER; note = 2'-O-methylguanosine-3'-phosphate
  modified_base 20: mod_base = OTHER; note = 2'-O-methyladenosine-3'-phosphate
  modified_base 21: mod_base = OTHER; note 2'-O-methyluridine-3'-phosphate-N-[tris(GalNAc-alkyl)-amido decanoyl)]-4-hydroxyprolinol (Hyp-(GalNAc-alkyl)3)
agaaccttccctggtgtggat

SEQ ID NO: 4922 - RNA, 21 nt, synthetic construct
  source 1..21: mol_type = other RNA
  modified_base 1: mod_base = OTHER; note = 2'-O-methylcytidine-3'- phosphorothioate
  modified_base 2: mod_base = OTHER; note = 2'-O-methyluridine-3'-phosphorothioate
  modified_base 3: mod_base = OTHER; note = 2'-O-methyluridine-3'-phosphate
  modified_base 4: mod_base = OTHER; note = 2'-O-methylcytidine-3'-phosphate
  modified_base 5: mod_base = OTHER; note = 2'-O-methylcytidine-3'-phosphate
  modified_base 6: mod_base = OTHER; note = 2'-O-methylcytidine-3'-phosphate
  modified_base 7: mod_base = OTHER; note = 2'-fluorouridine-3'-phosphate
  modified_base 8: mod_base = OTHER; note = 2'-O-methylguanosine-3'-phosphate
  modified_base 9: mod_base = OTHER; note = 2'-fluoroguanosine-3'-phosphate
  modified_base 10: mod_base = OTHER; note = 2'-fluorouridine-3'-phosphate
  modified_base 11: mod_base = OTHER; note = 2'-fluoroguanosine-3'-phosphate
  modified_base 12: mod_base = OTHER; note = 2'-O-methyluridine-3'-phosphate
  modified_base 13: mod_base = OTHER; note = 2'-O-methylguanosine-3'-phosphate
  modified_base 14: mod_base = OTHER; note = 2'-O-methylguanosine-3'-phosphate
  modified_base 15: mod_base = OTHER; note = 2'-O-methyladenosine-3'-phosphate
  modified_base 16: mod_base = OTHER; note = 2'-O-methylguanosine-3'-phosphate
  modified_base 17: mod_base = OTHER; note = 2'-O-methylguanosine-3'-phosphate
  modified_base 18: mod_base = OTHER; note = 2'-O-methylcytidine-3'-phosphate
  modified_base 19: mod_base = OTHER; note = 2'-O-methyladenosine-3'-phosphate
  modified_base 20: mod_base = OTHER; note = 2'-O-methylguanosine-3'-phosphate
  modified_base 21: mod_base = OTHER; note 2'-O-methyluridine-3'-phosphate-N-[tris(GalNAc-alkyl)-amido decanoyl)]-4-hydroxyprolinol (Hyp-(GalNAc-alkyl)3)
cttccctggtgtggaggcagt

SEQ ID NO: 4923 - RNA, 21 nt, synthetic construct
  source 1..21: mol_type = other RNA
  modified_base 1: mod_base = OTHER; note = 2'-O-methylcytidine-3'- phosphorothioate
  modified_base 2: mod_base = OTHER; note = 2'-O-methyladenosine-3'- phosphorothioate
  modified_base 3: mod_base = OTHER; note = 2'-O-methylguanosine-3'-phosphate
  modified_base 4: mod_base = OTHER; note = 2'-O-methylguanosine-3'-phosphate
  modified_base 5: mod_base = OTHER; note = 2'-O-methyladenosine-3'-phosphate
  modified_base 6: mod_base = OTHER; note = 2'-O-methyluridine-3'-phosphate
  modified_base 7: mod_base = OTHER; note = 2'-fluoroguanosine-3'-phosphate
  modified_base 8: mod_base = OTHER; note = 2'-O-methylcytidine-3'-phosphate
  modified_base 9: mod_base = OTHER; note = 2'-fluorouridine-3'-phosphate
  modified_base 10: mod_base = OTHER; note = 2'-fluorocytidine-3'-phosphate
  modified_base 11: mod_base = OTHER; note = 2'-fluorocytidine-3'-phosphate
  modified_base 12: mod_base = OTHER; note = 2'-O-methylguanosine-3'-phosphate
  modified_base 13: mod_base = OTHER; note = 2'-O-methylguanosine-3'-phosphate
  modified_base 14: mod_base = OTHER; note = 2'-O-methyladenosine-3'-phosphate
  modified_base 15: mod_base = OTHER; note = 2'-O-methylcytidine-3'-phosphate
  modified_base 16: mod_base = OTHER; note = 2'-O-methylcytidine-3'-phosphate
  modified_base 17: mod_base = OTHER; note = 2'-O-methyluridine-3'-phosphate
  modified_base 18: mod_base = OTHER; note = 2'-O-methylguanosine-3'-phosphate
  modified_base 19: mod_base = OTHER; note = 2'-O-methyluridine-3'-phosphate
  modified_base 20: mod_base = OTHER; note = 2'-O-methyluridine-3'-phosphate
  modified_base 21: mod_base = OTHER; note 2'-O-methyluridine-3'-phosphate-N-[tris(GalNAc-alkyl)-amido decanoyl)]-4-hydroxyprolinol (Hyp-(GalNAc-alkyl)3)
caggatgctccggacctgttt

SEQ ID NO: 4924 - RNA, 21 nt, synthetic construct
  source 1..21: mol_type = other RNA
  modified_base 1: mod_base = OTHER; note = 2'-O-methyluridine-3'-phosphorothioate
  modified_base 2: mod_base = OTHER; note = 2'-O-methylguanosine-3'- phosphorothioate
  modified_base 3: mod_base = OTHER; note = 2'-O-methylcytidine-3'-phosphate
  modified_base 4: mod_base = OTHER; note = 2'-O-methyluridine-3'-phosphate
  modified_base 5: mod_base = OTHER; note = 2'-O-methylcytidine-3'-phosphate
  modified_base 6: mod_base = OTHER; note = 2'-O-methylcytidine-3'-phosphate
  modified_base 7: mod_base = OTHER; note = 2'-fluoroguanosine-3'-phosphate
  modified_base 8: mod_base = OTHER; note = 2'-O-methylguanosine-3'-phosphate
  modified_base 9: mod_base = OTHER; note = 2'-fluoroadenosine-3'-phosphate
  modified_base 10: mod_base = OTHER; note = 2'-fluorocytidine-3'-phosphate
  modified_base 11: mod_base = OTHER; note = 2'-fluorocytidine-3'-phosphate
  modified_base 12: mod_base = OTHER; note = 2'-O-methyluridine-3'-phosphate
  modified_base 13: mod_base = OTHER; note = 2'-O-methylguanosine-3'-phosphate
  modified_base 14: mod_base = OTHER; note = 2'-O-methyluridine-3'-phosphate
  modified_base 15: mod_base = OTHER; note = 2'-O-methyluridine-3'-phosphate
  modified_base 16: mod_base = OTHER; note = 2'-O-methyladenosine-3'-phosphate
  modified_base 17: mod_base = OTHER; note = 2'-O-methylcytidine-3'-phosphate
  modified_base 18: mod_base = OTHER; note = 2'-O-methylguanosine-3'-phosphate
  modified_base 19: mod_base = OTHER; note = 2'-O-methyluridine-3'-phosphate
  modified_base 20: mod_base = OTHER; note = 2'-O-methylguanosine-3'-phosphate
  modified_base 21: mod_base = OTHER; note 2'-O-methyluridine-3'-phosphate-N-[tris(GalNAc-alkyl)-amido decanoyl)]-4-hydroxyprolinol (Hyp-(GalNAc-alkyl)3)
tgctccggacctgttacgtgt

SEQ ID NO: 4925 - RNA, 21 nt, synthetic construct
  source 1..21: mol_type = other RNA
  modified_base 1: mod_base = OTHER; note = 2'-O-methylguanosine-3'- phosphorothioate
  modified_base 2: mod_base = OTHER; note = 2'-O-methyladenosine-3'- phosphorothioate
  modified_base 3: mod_base = OTHER; note = 2'-O-methylcytidine-3'-phosphate
  modified_base 4: mod_base = OTHER; note = 2'-O-methylcytidine-3'-phosphate
  modified_base 5: mod_base = OTHER; note = 2'-O-methyluridine-3'-phosphate
  modified_base 6: mod_base = OTHER; note = 2'-O-methylguanosine-3'-phosphate
  modified_base 7: mod_base = OTHER; note = 2'-fluorouridine-3'-phosphate
  modified_base 8: mod_base = OTHER; note = 2'-O-methyluridine-3'-phosphate
  modified_base 9: mod_base = OTHER; note = 2'-fluoroadenosine-3'-phosphate
  modified_base 10: mod_base = OTHER; note = 2'-fluorocytidine-3'-phosphate
  modified_base 11: mod_base = OTHER; note = 2'-fluoroguanosine-3'-phosphate
  modified_base 12: mod_base = OTHER; note = 2'-O-methyluridine-3'-phosphate
  modified_base 13: mod_base = OTHER; note = 2'-O-methylguanosine-3'-phosphate
  modified_base 14: mod_base = OTHER; note = 2'-O-methylcytidine-3'-phosphate
  modified_base 15: mod_base = OTHER; note = 2'-O-methyluridine-3'-phosphate
  modified_base 16: mod_base = OTHER; note = 2'-O-methylcytidine-3'-phosphate
  modified_base 17: mod_base = OTHER; note = 2'-O-methyluridine-3'-phosphate
  modified_base 18: mod_base = OTHER; note = 2'-O-methylguanosine-3'-phosphate
  modified_base 19: mod_base = OTHER; note = 2'-O-methyluridine-3'-phosphate
  modified_base 20: mod_base = OTHER; note = 2'-O-methyluridine-3'-phosphate
  modified_base 21: mod_base = OTHER; note 2'-O-methyluridine-3'-phosphate-N-[tris(GalNAc-alkyl)-amido decanoyl)]-4-hydroxyprolinol (Hyp-(GalNAc-alkyl)3)
gacctgttacgtgctctgttt

SEQ ID NO: 4926 - RNA, 21 nt, synthetic construct
  source 1..21: mol_type = other RNA
  modified_base 1: mod_base = OTHER; note = 2'-O-methyluridine-3'-phosphorothioate
  modified_base 2: mod_base = OTHER; note = 2'-O-methyladenosine-3'- phosphorothioate
  modified_base 3: mod_base = OTHER; note = 2'-O-methylcytidine-3'-phosphate
  modified_base 4: mod_base = OTHER; note = 2'-O-methylguanosine-3'-phosphate
  modified_base 5: mod_base = OTHER; note = 2'-O-methyluridine-3'-phosphate
  modified_base 6: mod_base = OTHER; note = 2'-O-methylguanosine-3'-phosphate
  modified_base 7: mod_base = OTHER; note = 2'-fluorocytidine-3'-phosphate
  modified_base 8: mod_base = OTHER; note = 2'-O-methyluridine-3'-phosphate
  modified_base 9: mod_base = OTHER; note = 2'-fluorocytidine-3'-phosphate
  modified_base 10: mod_base = OTHER; note = 2'-fluorouridine-3'-phosphate
  modified_base 11: mod_base = OTHER; note = 2'-fluoroguanosine-3'-phosphate
  modified_base 12: mod_base = OTHER; note = 2'-O-methyluridine-3'-phosphate
  modified_base 13: mod_base = OTHER; note = 2'-O-methyluridine-3'-phosphate
  modified_base 14: mod_base = OTHER; note = 2'-O-methylcytidine-3'-phosphate
  modified_base 15: mod_base = OTHER; note = 2'-O-methylcytidine-3'-phosphate
  modified_base 16: mod_base = OTHER; note = 2'-O-methylcytidine-3'-phosphate
  modified_base 17: mod_base = OTHER; note = 2'-O-methyladenosine-3'-phosphate
  modified_base 18: mod_base = OTHER; note = 2'-O-methyladenosine-3'-phosphate
  modified_base 19: mod_base = OTHER; note = 2'-O-methylguanosine-3'-phosphate
  modified_base 20: mod_base = OTHER; note = 2'-O-methylcytidine-3'-phosphate
  modified_base 21: mod_base = OTHER; note 2'-O-methyluridine-3'-phosphate-N-[tris(GalNAc-alkyl)-amido decanoyl)]-4-hydroxyprolinol (Hyp-(GalNAc-alkyl)3)
tacgtgctctgttcccaagct

SEQ ID NO: 4927 - RNA, 21 nt, synthetic construct
  source 1..21: mol_type = other RNA
  modified_base 1: mod_base = OTHER; note = 2'-O-methylguanosine-3'- phosphorothioate
  modified_base 2: mod_base = OTHER; note = 2'-O-methylcytidine-3'- phosphorothioate
  modified_base 3: mod_base = OTHER; note = 2'-O-methyluridine-3'-phosphate
  modified_base 4: mod_base = OTHER; note = 2'-O-methylcytidine-3'-phosphate
  modified_base 5: mod_base = OTHER; note = 2'-O-methyluridine-3'-phosphate
  modified_base 6: mod_base = OTHER; note = 2'-O-methylguanosine-3'-phosphate
  modified_base 7: mod_base = OTHER; note = 2'-fluorouridine-3'-phosphate
  modified_base 8: mod_base = OTHER; note = 2'-O-methyluridine-3'-phosphate
  modified_base 9: mod_base = OTHER; note = 2'-fluorocytidine-3'-phosphate
  modified_base 10: mod_base = OTHER; note = 2'-fluorocytidine-3'-phosphate
  modified_base 11: mod_base = OTHER; note = 2'-fluorocytidine-3'-phosphate
  modified_base 12: mod_base = OTHER; note = 2'-O-methyladenosine-3'-phosphate
  modified_base 13: mod_base = OTHER; note = 2'-O-methyladenosine-3'-phosphate
  modified_base 14: mod_base = OTHER; note = 2'-O-methylguanosine-3'-phosphate
  modified_base 15: mod_base = OTHER; note = 2'-O-methylcytidine-3'-phosphate
  modified_base 16: mod_base = OTHER; note = 2'-O-methyluridine-3'-phosphate
  modified_base 17: mod_base = OTHER; note = 2'-O-methylguanosine-3'-phosphate
  modified_base 18: mod_base = OTHER; note = 2'-O-methylguanosine-3'-phosphate
  modified_base 19: mod_base = OTHER; note = 2'-O-methyluridine-3'-phosphate
  modified_base 20: mod_base = OTHER; note = 2'-O-methylcytidine-3'-phosphate
  modified_base 21: mod_base = OTHER; note 2'-O-methyluridine-3'-phosphate-N-[tris(GalNAc-alkyl)-amido decanoyl)]-4-hydroxyprolinol (Hyp-(GalNAc-alkyl)3)
gctctgttcccaagctggtct

SEQ ID NO: 4928 - RNA, 21 nt, synthetic construct
  source 1..21: mol_type = other RNA
  modified_base 1: mod_base = OTHER; note = 2'-O-methylcytidine-3'- phosphorothioate
  modified_base 2: mod_base = OTHER; note = 2'-O-methyluridine-3'-phosphorothioate
  modified_base 3: mod_base = OTHER; note = 2'-O-methylguanosine-3'-phosphate
  modified_base 4: mod_base = OTHER; note = 2'-O-methylguanosine-3'-phosphate
  modified_base 5: mod_base = OTHER; note = 2'-O-methylcytidine-3'-phosphate
  modified_base 6: mod_base = OTHER; note = 2'-O-methyladenosine-3'-phosphate
  modified_base 7: mod_base = OTHER; note = 2'-fluoroguanosine-3'-phosphate
  modified_base 8: mod_base = OTHER; note = 2'-O-methyluridine-3'-phosphate
  modified_base 9: mod_base = OTHER; note = 2'-fluorocytidine-3'-phosphate
  modified_base 10: mod_base = OTHER; note = 2'-fluorocytidine-3'-phosphate
  modified_base 11: mod_base = OTHER; note = 2'-fluorocytidine-3'-phosphate
  modified_base 12: mod_base = OTHER; note = 2'-O-methyluridine-3'-phosphate
  modified_base 13: mod_base = OTHER; note = 2'-O-methylguanosine-3'-phosphate
  modified_base 14: mod_base = OTHER; note = 2'-O-methyladenosine-3'-phosphate
  modified_base 15: mod_base = OTHER; note = 2'-O-methylguanosine-3'-phosphate
  modified_base 16: mod_base = OTHER; note = 2'-O-methylcytidine-3'-phosphate
  modified_base 17: mod_base = OTHER; note = 2'-O-methyluridine-3'-phosphate
  modified_base 18: mod_base = OTHER; note = 2'-O-methyluridine-3'-phosphate
  modified_base 19: mod_base = OTHER; note = 2'-O-methyluridine-3'-phosphate
  modified_base 20: mod_base = OTHER; note = 2'-O-methylguanosine-3'-phosphate
  modified_base 21: mod_base = OTHER; note 2'-O-methyluridine-3'-phosphate-N-[tris(GalNAc-alkyl)-amido decanoyl)]-4-hydroxyprolinol (Hyp-(GalNAc-alkyl)3)
ctggcagtccctgagctttgt

SEQ ID NO: 4929 - RNA, 21 nt, synthetic construct
  source 1..21: mol_type = other RNA
  modified_base 1: mod_base = OTHER; note = 2'-O-methylguanosine-3'- phosphorothioate
  modified_base 2: mod_base = OTHER; note = 2'-O-methyluridine-3'-phosphorothioate
  modified_base 3: mod_base = OTHER; note = 2'-O-methylcytidine-3'-phosphate
  modified_base 4: mod_base = OTHER; note = 2'-O-methylcytidine-3'-phosphate
  modified_base 5: mod_base = OTHER; note = 2'-O-methylcytidine-3'-phosphate
  modified_base 6: mod_base = OTHER; note = 2'-O-methyluridine-3'-phosphate
  modified_base 7: mod_base = OTHER; note = 2'-fluoroguanosine-3'-phosphate
  modified_base 8: mod_base = OTHER; note = 2'-O-methyladenosine-3'-phosphate
  modified_base 9: mod_base = OTHER; note = 2'-fluoroguanosine-3'-phosphate
  modified_base 10: mod_base = OTHER; note = 2'-fluorocytidine-3'-phosphate
  modified_base 11: mod_base = OTHER; note = 2'-fluorouridine-3'-phosphate
  modified_base 12: mod_base = OTHER; note = 2'-O-methyluridine-3'-phosphate
  modified_base 13: mod_base = OTHER; note = 2'-O-methyluridine-3'-phosphate
  modified_base 14: mod_base = OTHER; note = 2'-O-methylguanosine-3'-phosphate
  modified_base 15: mod_base = OTHER; note = 2'-O-methyladenosine-3'-phosphate
  modified_base 16: mod_base = OTHER; note = 2'-O-methyluridine-3'-phosphate
  modified_base 17: mod_base = OTHER; note = 2'-O-methylguanosine-3'-phosphate
  modified_base 18: mod_base = OTHER; note = 2'-O-methylguanosine-3'-phosphate
  modified_base 19: mod_base = OTHER; note = 2'-O-methylcytidine-3'-phosphate
  modified_base 20: mod_base = OTHER; note = 2'-O-methylguanosine-3'-phosphate
  modified_base 21: mod_base = OTHER; note 2'-O-methyluridine-3'-phosphate-N-[tris(GalNAc-alkyl)-amido decanoyl)]-4-hydroxyprolinol (Hyp-(GalNAc-alkyl)3)
gtccctgagctttgatggcgt

SEQ ID NO: 4930 - RNA, 21 nt, synthetic construct
  source 1..21: mol_type = other RNA
  modified_base 1: mod_base = OTHER; note = 2'-O-methylguanosine-3'- phosphorothioate
  modified_base 2: mod_base = OTHER; note = 2'-O-methylcytidine-3'- phosphorothioate
  modified_base 3: mod_base = OTHER; note = 2'-O-methylcytidine-3'-phosphate
  modified_base 4: mod_base = OTHER; note = 2'-O-methyluridine-3'-phosphate
  modified_base 5: mod_base = OTHER; note = 2'-O-methyluridine-3'-phosphate
  modified_base 6: mod_base = OTHER; note = 2'-O-methylcytidine-3'-phosphate
  modified_base 7: mod_base = OTHER; note = 2'-fluorocytidine-3'-phosphate
  modified_base 8: mod_base = OTHER; note = 2'-O-methyladenosine-3'-phosphate
  modified_base 9: mod_base = OTHER; note = 2'-fluorocytidine-3'-phosphate
  modified_base 10: mod_base = OTHER; note = 2'-fluorocytidine-3'-phosphate
  modified_base 11: mod_base = OTHER; note = 2'-fluorouridine-3'-phosphate
  modified_base 12: mod_base = OTHER; note = 2'-O-methyluridine-3'-phosphate
  modified_base 13: mod_base = OTHER; note = 2'-O-methyladenosine-3'-phosphate
  modified_base 14: mod_base = OTHER; note = 2'-O-methyladenosine-3'-phosphate
  modified_base 15: mod_base = OTHER; note = 2'-O-methylguanosine-3'-phosphate
  modified_base 16: mod_base = OTHER; note = 2'-O-methylguanosine-3'-phosphate
  modified_base 17: mod_base = OTHER; note = 2'-O-methylguanosine-3'-phosphate
  modified_base 18: mod_base = OTHER; note = 2'-O-methylcytidine-3'-phosphate
  modified_base 19: mod_base = OTHER; note = 2'-O-methyladenosine-3'-phosphate
  modified_base 20: mod_base = OTHER; note = 2'-O-methylcytidine-3'-phosphate
  modified_base 21: mod_base = OTHER; note 2'-O-methyluridine-3'-phosphate-N-[tris(GalNAc-alkyl)-amido decanoyl)]-4-hydroxyprolinol (Hyp-(GalNAc-alkyl)3)
gccttccaccttaagggcact

SEQ ID NO: 4931 - RNA, 21 nt, synthetic construct
  source 1..21: mol_type = other RNA
  modified_base 1: mod_base = OTHER; note = 2'-O-methylcytidine-3'- phosphorothioate
  modified_base 2: mod_base = OTHER; note = 2'-O-methyladenosine-3'- phosphorothioate
  modified_base 3: mod_base = OTHER; note = 2'-O-methylcytidine-3'-phosphate
  modified_base 4: mod_base = OTHER; note = 2'-O-methylcytidine-3'-phosphate
  modified_base 5: mod_base = OTHER; note = 2'-O-methyluridine-3'-phosphate
  modified_base 6: mod_base = OTHER; note = 2'-O-methyluridine-3'-phosphate
  modified_base 7: mod_base = OTHER; note = 2'-fluoroadenosine-3'-phosphate
  modified_base 8: mod_base = OTHER; note = 2'-O-methyladenosine-3'-phosphate
  modified_base 9: mod_base = OTHER; note = 2'-fluoroguanosine-3'-phosphate
  modified_base 10: mod_base = OTHER; note = 2'-fluoroguanosine-3'-phosphate
  modified_base 11: mod_base = OTHER; note = 2'-fluoroguanosine-3'-phosphate
  modified_base 12: mod_base = OTHER; note = 2'-O-methylcytidine-3'-phosphate
  modified_base 13: mod_base = OTHER; note = 2'-O-methyladenosine-3'-phosphate
  modified_base 14: mod_base = OTHER; note = 2'-O-methylcytidine-3'-phosphate
  modified_base 15: mod_base = OTHER; note = 2'-O-methyladenosine-3'-phosphate
  modified_base 16: mod_base = OTHER; note = 2'-O-methylguanosine-3'-phosphate
  modified_base 17: mod_base = OTHER; note = 2'-O-methylguanosine-3'-phosphate
  modified_base 18: mod_base = OTHER; note = 2'-O-methyladenosine-3'-phosphate
  modified_base 19: mod_base = OTHER; note = 2'-O-methylguanosine-3'-phosphate
  modified_base 20: mod_base = OTHER; note = 2'-O-methyladenosine-3'-phosphate
  modified_base 21: mod_base = OTHER; note 2'-O-methyluridine-3'-phosphate-N-[tris(GalNAc-alkyl)-amido decanoyl)]-4-hydroxyprolinol (Hyp-(GalNAc-alkyl)3)
caccttaagggcacaggagat

SEQ ID NO: 4932 - RNA, 21 nt, synthetic construct
  source 1..21: mol_type = other RNA
  modified_base 1: mod_base = OTHER; note = 2'-O-methylguanosine-3'- phosphorothioate
  modified_base 2: mod_base = OTHER; note = 2'-O-methylguanosine-3'- phosphorothioate
  modified_base 3: mod_base = OTHER; note = 2'-O-methylguanosine-3'-phosphate
  modified_base 4: mod_base = OTHER; note = 2'-O-methylcytidine-3'-phosphate
  modified_base 5: mod_base = OTHER; note = 2'-O-methyladenosine-3'-phosphate
  modified_base 6: mod_base = OTHER; note = 2'-O-methylcytidine-3'-phosphate
  modified_base 7: mod_base = OTHER; note = 2'-fluoroadenosine-3'-phosphate
  modified_base 8: mod_base = OTHER; note = 2'-O-methylguanosine-3'-phosphate
  modified_base 9: mod_base = OTHER; note = 2'-fluoroguanosine-3'-phosphate
  modified_base 10: mod_base = OTHER; note = 2'-fluoroadenosine-3'-phosphate
  modified_base 11: mod_base = OTHER; note = 2'-fluoroguanosine-3'-phosphate
  modified_base 12: mod_base = OTHER; note = 2'-O-methyladenosine-3'-phosphate
  modified_base 13: mod_base = OTHER; note = 2'-O-methylguanosine-3'-phosphate
  modified_base 14: mod_base = OTHER; note = 2'-O-methylcytidine-3'-phosphate
  modified_base 15: mod_base = OTHER; note = 2'-O-methyluridine-3'-phosphate
  modified_base 16: mod_base = OTHER; note = 2'-O-methylguanosine-3'-phosphate
  modified_base 17: mod_base = OTHER; note = 2'-O-methyladenosine-3'-phosphate
  modified_base 18: mod_base = OTHER; note = 2'-O-methylcytidine-3'-phosphate
  modified_base 19: mod_base = OTHER; note = 2'-O-methyladenosine-3'-phosphate
  modified_base 20: mod_base = OTHER; note = 2'-O-methylcytidine-3'-phosphate
  modified_base 21: mod_base = OTHER; note 2'-O-methyluridine-3'-phosphate-N-[tris(GalNAc-alkyl)-amido decanoyl)]-4-hydroxyprolinol (Hyp-(GalNAc-alkyl)3)
gggcacaggagagctgacact

SEQ ID NO: 4933 - RNA, 21 nt, synthetic construct
  source 1..21: mol_type = other RNA
  modified_base 1: mod_base = OTHER; note = 2'-O-methylguanosine-3'- phosphorothioate
  modified_base 2: mod_base = OTHER; note = 2'-O-methylguanosine-3'- phosphorothioate
  modified_base 3: mod_base = OTHER; note = 2'-O-methyladenosine-3'-phosphate
  modified_base 4: mod_base = OTHER; note = 2'-O-methylguanosine-3'-phosphate
  modified_base 5: mod_base = OTHER; note = 2'-O-methyladenosine-3'-phosphate
  modified_base 6: mod_base = OTHER; note = 2'-O-methylguanosine-3'-phosphate
  modified_base 7: mod_base = OTHER; note = 2'-fluorocytidine-3'-phosphate
  modified_base 8: mod_base = OTHER; note = 2'-O-methyluridine-3'-phosphate
  modified_base 9: mod_base = OTHER; note = 2'-fluoroguanosine-3'-phosphate
  modified_base 10: mod_base = OTHER; note = 2'-fluoroadenosine-3'-phosphate
  modified_base 11: mod_base = OTHER; note = 2'-fluorocytidine-3'-phosphate
  modified_base 12: mod_base = OTHER; note = 2'-O-methyladenosine-3'-phosphate
  modified_base 13: mod_base = OTHER; note = 2'-O-methylcytidine-3'-phosphate
  modified_base 14: mod_base = OTHER; note = 2'-O-methylguanosine-3'-phosphate
  modified_base 15: mod_base = OTHER; note = 2'-O-methylguanosine-3'-phosphate
  modified_base 16: mod_base = OTHER; note = 2'-O-methylguanosine-3'-phosphate
  modified_base 17: mod_base = OTHER; note = 2'-O-methylcytidine-3'-phosphate
  modified_base 18: mod_base = OTHER; note = 2'-O-methylcytidine-3'-phosphate
  modified_base 19: mod_base = OTHER; note = 2'-O-methyluridine-3'-phosphate
  modified_base 20: mod_base = OTHER; note = 2'-O-methyluridine-3'-phosphate
  modified_base 21: mod_base = OTHER; note 2'-O-methyluridine-3'-phosphate-N-[tris(GalNAc-alkyl)-amido decanoyl)]-4-hydroxyprolinol (Hyp-(GalNAc-alkyl)3)
ggagagctgacacgggccttt

SEQ ID NO: 4934 - RNA, 21 nt, synthetic construct
  source 1..21: mol_type = other RNA
  modified_base 1: mod_base = OTHER; note = 2'-O-methylguanosine-3'- phosphorothioate
  modified_base 2: mod_base = OTHER; note = 2'-O-methyladenosine-3'- phosphorothioate
  modified_base 3: mod_base = OTHER; note = 2'-O-methylcytidine-3'-phosphate
  modified_base 4: mod_base = OTHER; note = 2'-O-methyladenosine-3'-phosphate
  modified_base 5: mod_base = OTHER; note = 2'-O-methylcytidine-3'-phosphate
  modified_base 6: mod_base = OTHER; note = 2'-O-methylguanosine-3'-phosphate
  modified_base 7: mod_base = OTHER; note = 2'-fluoroguanosine-3'-phosphate
  modified_base 8: mod_base = OTHER; note = 2'-O-methylguanosine-3'-phosphate
  modified_base 9: mod_base = OTHER; note = 2'-fluorocytidine-3'-phosphate
  modified_base 10: mod_base = OTHER; note = 2'-fluorocytidine-3'-phosphate
  modified_base 11: mod_base = OTHER; note = 2'-fluorouridine-3'-phosphate
  modified_base 12: mod_base = OTHER; note = 2'-O-methyluridine-3'-phosphate
  modified_base 13: mod_base = OTHER; note = 2'-O-methylguanosine-3'-phosphate
  modified_base 14: mod_base = OTHER; note = 2'-O-methylcytidine-3'-phosphate
  modified_base 15: mod_base = OTHER; note = 2'-O-methyluridine-3'-phosphate
  modified_base 16: mod_base = OTHER; note = 2'-O-methylguanosine-3'-phosphate
  modified_base 17: mod_base = OTHER; note = 2'-O-methylguanosine-3'-phosphate
  modified_base 18: mod_base = OTHER; note = 2'-O-methyluridine-3'-phosphate
  modified_base 19: mod_base = OTHER; note = 2'-O-methyluridine-3'-phosphate
  modified_base 20: mod_base = OTHER; note = 2'-O-methylcytidine-3'-phosphate
  modified_base 21: mod_base = OTHER; note 2'-O-methyluridine-3'-phosphate-N-[tris(GalNAc-alkyl)-amido decanoyl)]-4-hydroxyprolinol (Hyp-(GalNAc-alkyl)3)
gacacgggccttgctggttct

SEQ ID NO: 4935 - RNA, 21 nt, synthetic construct
  source 1..21: mol_type = other RNA
  modified_base 1: mod_base = OTHER; note = 2'-O-methylcytidine-3'- phosphorothioate
  modified_base 2: mod_base = OTHER; note = 2'-O-methyluridine-3'-phosphorothioate
  modified_base 3: mod_base = OTHER; note = 2'-O-methyluridine-3'-phosphate
  modified_base 4: mod_base = OTHER; note = 2'-O-methylguanosine-3'-phosphate
  modified_base 5: mod_base = OTHER; note = 2'-O-methylcytidine-3'-phosphate
  modified_base 6: mod_base = OTHER; note = 2'-O-methyluridine-3'-phosphate
  modified_base 7: mod_base = OTHER; note = 2'-fluoroguanosine-3'-phosphate
  modified_base 8: mod_base = OTHER; note = 2'-O-methylguanosine-3'-phosphate
  modified_base 9: mod_base = OTHER; note = 2'-fluorouridine-3'-phosphate
  modified_base 10: mod_base = OTHER; note = 2'-fluorouridine-3'-phosphate
  modified_base 11: mod_base = OTHER; note = 2'-fluorocytidine-3'-phosphate
  modified_base 12: mod_base = OTHER; note = 2'-O-methyluridine-3'-phosphate
  modified_base 13: mod_base = OTHER; note = 2'-O-methylcytidine-3'-phosphate
  modified_base 14: mod_base = OTHER; note = 2'-O-methylcytidine-3'-phosphate
  modified_base 15: mod_base = OTHER; note = 2'-O-methylguanosine-3'-phosphate
  modified_base 16: mod_base = OTHER; note = 2'-O-methylguanosine-3'-phosphate
  modified_base 17: mod_base = OTHER; note = 2'-O-methylcytidine-3'-phosphate
  modified_base 18: mod_base = OTHER; note = 2'-O-methyluridine-3'-phosphate
  modified_base 19: mod_base = OTHER; note = 2'-O-methylguanosine-3'-phosphate
  modified_base 20: mod_base = OTHER; note = 2'-O-methyluridine-3'-phosphate
  modified_base 21: mod_base = OTHER; note 2'-O-methyluridine-3'-phosphate-N-[tris(GalNAc-alkyl)-amido decanoyl)]-4-hydroxyprolinol (Hyp-(GalNAc-alkyl)3)
cttgctggttctccggctgtt

SEQ ID NO: 4936 - RNA, 21 nt, synthetic construct
  source 1..21: mol_type = other RNA
  modified_base 1: mod_base = OTHER; note = 2'-O-methylguanosine-3'- phosphorothioate
  modified_base 2: mod_base = OTHER; note = 2'-O-methylguanosine-3'- phosphorothioate
  modified_base 3: mod_base = OTHER; note = 2'-O-methyluridine-3'-phosphate
  modified_base 4: mod_base = OTHER; note = 2'-O-methyluridine-3'-phosphate
  modified_base 5: mod_base = OTHER; note = 2'-O-methylcytidine-3'-phosphate
  modified_base 6: mod_base = OTHER; note = 2'-O-methyluridine-3'-phosphate
  modified_base 7: mod_base = OTHER; note = 2'-fluorocytidine-3'-phosphate
  modified_base 8: mod_base = OTHER; note = 2'-O-methylcytidine-3'-phosphate
  modified_base 9: mod_base = OTHER; note = 2'-fluoroguanosine-3'-phosphate
  modified_base 10: mod_base = OTHER; note = 2'-fluoroguanosine-3'-phosphate
  modified_base 11: mod_base = OTHER; note = 2'-fluorocytidine-3'-phosphate
  modified_base 12: mod_base = OTHER; note = 2'-O-methyluridine-3'-phosphate
  modified_base 13: mod_base = OTHER; note = 2'-O-methylguanosine-3'-phosphate
  modified_base 14: mod_base = OTHER; note = 2'-O-methyluridine-3'-phosphate
  modified_base 15: mod_base = OTHER; note = 2'-O-methylguanosine-3'-phosphate
  modified_base 16: mod_base = OTHER; note = 2'-O-methyluridine-3'-phosphate
  modified_base 17: mod_base = OTHER; note = 2'-O-methylguanosine-3'-phosphate
  modified_base 18: mod_base = OTHER; note = 2'-O-methylcytidine-3'-phosphate
  modified_base 19: mod_base = OTHER; note = 2'-O-methylcytidine-3'-phosphate
  modified_base 20: mod_base = OTHER; note = 2'-O-methyluridine-3'-phosphate
  modified_base 21: mod_base = OTHER; note 2'-O-methyluridine-3'-phosphate-N-[tris(GalNAc-alkyl)-amido decanoyl)]-4-hydroxyprolinol (Hyp-(GalNAc-alkyl)3)
ggttctccggctgtgtgcctt

SEQ ID NO: 4937 - RNA, 21 nt, synthetic construct
  source 1..21: mol_type = other RNA
  modified_base 1: mod_base = OTHER; note = 2'-O-methylcytidine-3'- phosphorothioate
  modified_base 2: mod_base = OTHER; note = 2'-O-methyluridine-3'-phosphorothioate
  modified_base 3: mod_base = OTHER; note = 2'-O-methylcytidine-3'-phosphate
  modified_base 4: mod_base = OTHER; note = 2'-O-methylguanosine-3'-phosphate
  modified_base 5: mod_base = OTHER; note = 2'-O-methyluridine-3'-phosphate
  modified_base 6: mod_base = OTHER; note = 2'-O-methylcytidine-3'-phosphate
  modified_base 7: mod_base = OTHER; note = 2'-fluoroadenosine-3'-phosphate
  modified_base 8: mod_base = OTHER; note = 2'-O-methylcytidine-3'-phosphate
  modified_base 9: mod_base = OTHER; note = 2'-fluorouridine-3'-phosphate
  modified_base 10: mod_base = OTHER; note = 2'-fluorocytidine-3'-phosphate
  modified_base 11: mod_base = OTHER; note = 2'-fluoroadenosine-3'-phosphate
  modified_base 12: mod_base = OTHER; note = 2'-O-methylcytidine-3'-phosphate
  modified_base 13: mod_base = OTHER; note = 2'-O-methylguanosine-3'-phosphate
  modified_base 14: mod_base = OTHER; note = 2'-O-methylguanosine-3'-phosphate
  modified_base 15: mod_base = OTHER; note = 2'-O-methylguanosine-3'-phosphate
  modified_base 16: mod_base = OTHER; note = 2'-O-methylcytidine-3'-phosphate
  modified_base 17: mod_base = OTHER; note = 2'-O-methyluridine-3'-phosphate
  modified_base 18: mod_base = OTHER; note = 2'-O-methylguanosine-3'-phosphate
  modified_base 19: mod_base = OTHER; note = 2'-O-methyluridine-3'-phosphate
  modified_base 20: mod_base = OTHER; note = 2'-O-methyluridine-3'-phosphate
  modified_base 21: mod_base = OTHER; note 2'-O-methyluridine-3'-phosphate-N-[tris(GalNAc-alkyl)-amido decanoyl)]-4-hydroxyprolinol (Hyp-(GalNAc-alkyl)3)
ctcgtcactcacgggctgttt

SEQ ID NO: 4938 - RNA, 21 nt, synthetic construct
  source 1..21: mol_type = other RNA
  modified_base 1: mod_base = OTHER; note = 2'-O-methylcytidine-3'- phosphorothioate
  modified_base 2: mod_base = OTHER; note = 2'-O-methyluridine-3'-phosphorothioate
  modified_base 3: mod_base = OTHER; note = 2'-O-methylcytidine-3'-phosphate
  modified_base 4: mod_base = OTHER; note = 2'-O-methyladenosine-3'-phosphate
  modified_base 5: mod_base = OTHER; note = 2'-O-methylcytidine-3'-phosphate
  modified_base 6: mod_base = OTHER; note = 2'-O-methylguanosine-3'-phosphate
  modified_base 7: mod_base = OTHER; note = 2'-fluoroguanosine-3'-phosphate
  modified_base 8: mod_base = OTHER; note = 2'-O-methylguanosine-3'-phosphate
  modified_base 9: mod_base = OTHER; note = 2'-fluorocytidine-3'-phosphate
  modified_base 10: mod_base = OTHER; note = 2'-fluorouridine-3'-phosphate
  modified_base 11: mod_base = OTHER; note = 2'-fluoroguanosine-3'-phosphate
  modified_base 12: mod_base = OTHER; note = 2'-O-methyluridine-3'-phosphate
  modified_base 13: mod_base = OTHER; note = 2'-O-methyluridine-3'-phosphate
  modified_base 14: mod_base = OTHER; note = 2'-O-methylguanosine-3'-phosphate
  modified_base 15: mod_base = OTHER; note = 2'-O-methylcytidine-3'-phosphate
  modified_base 16: mod_base = OTHER; note = 2'-O-methyluridine-3'-phosphate
  modified_base 17: mod_base = OTHER; note = 2'-O-methylcytidine-3'-phosphate
  modified_base 18: mod_base = OTHER; note = 2'-O-methylcytidine-3'-phosphate
  modified_base 19: mod_base = OTHER; note = 2'-O-methyladenosine-3'-phosphate
  modified_base 20: mod_base = OTHER; note = 2'-O-methylguanosine-3'-phosphate
  modified_base 21: mod_base = OTHER; note 2'-O-methyluridine-3'-phosphate-N-[tris(GalNAc-alkyl)-amido decanoyl)]-4-hydroxyprolinol (Hyp-(GalNAc-alkyl)3)
ctcacgggctgttgctccagt

SEQ ID NO: 4939 - RNA, 21 nt, synthetic construct
  source 1..21: mol_type = other RNA
  modified_base 1: mod_base = OTHER; note = 2'-O-methyluridine-3'-phosphorothioate
  modified_base 2: mod_base = OTHER; note = 2'-O-methyluridine-3'-phosphorothioate
  modified_base 3: mod_base = OTHER; note = 2'-O-methylguanosine-3'-phosphate
  modified_base 4: mod_base = OTHER; note = 2'-O-methylcytidine-3'-phosphate
  modified_base 5: mod_base = OTHER; note = 2'-O-methyluridine-3'-phosphate
  modified_base 6: mod_base = OTHER; note = 2'-O-methylcytidine-3'-phosphate
  modified_base 7: mod_base = OTHER; note = 2'-fluorocytidine-3'-phosphate
  modified_base 8: mod_base = OTHER; note = 2'-O-methyladenosine-3'-phosphate
  modified_base 9: mod_base = OTHER; note = 2'-fluoroguanosine-3'-phosphate
  modified_base 10: mod_base = OTHER; note = 2'-fluoroguanosine-3'-phosphate
  modified_base 11: mod_base = OTHER; note = 2'-fluorocytidine-3'-phosphate
  modified_base 12: mod_base = OTHER; note = 2'-O-methylcytidine-3'-phosphate
  modified_base 13: mod_base = OTHER; note = 2'-O-methyluridine-3'-phosphate
  modified_base 14: mod_base = OTHER; note = 2'-O-methylguanosine-3'-phosphate
  modified_base 15: mod_base = OTHER; note = 2'-O-methylguanosine-3'-phosphate
  modified_base 16: mod_base = OTHER; note = 2'-O-methyluridine-3'-phosphate
  modified_base 17: mod_base = OTHER; note = 2'-O-methylcytidine-3'-phosphate
  modified_base 18: mod_base = OTHER; note = 2'-O-methyluridine-3'-phosphate
  modified_base 19: mod_base = OTHER; note = 2'-O-methylcytidine-3'-phosphate
  modified_base 20: mod_base = OTHER; note = 2'-O-methylguanosine-3'-phosphate
  modified_base 21: mod_base = OTHER; note 2'-O-methyluridine-3'-phosphate-N-[tris(GalNAc-alkyl)-amido decanoyl)]-4-hydroxyprolinol (Hyp-(GalNAc-alkyl)3)
ttgctccaggcctggtctcgt

SEQ ID NO: 4940 - RNA, 21 nt, synthetic construct
  source 1..21: mol_type = other RNA
  modified_base 1: mod_base = OTHER; note = 2'-O-methylguanosine-3'- phosphorothioate
  modified_base 2: mod_base = OTHER; note = 2'-O-methylguanosine-3'- phosphorothioate
  modified_base 3: mod_base = OTHER; note = 2'-O-methylcytidine-3'-phosphate
  modified_base 4: mod_base = OTHER; note = 2'-O-methyluridine-3'-phosphate
  modified_base 5: mod_base = OTHER; note = 2'-O-methylcytidine-3'-phosphate
  modified_base 6: mod_base = OTHER; note = 2'-O-methyluridine-3'-phosphate
  modified_base 7: mod_base = OTHER; note = 2'-fluorocytidine-3'-phosphate
  modified_base 8: mod_base = OTHER; note = 2'-O-methyladenosine-3'-phosphate
  modified_base 9: mod_base = OTHER; note = 2'-fluoroguanosine-3'-phosphate
  modified_base 10: mod_base = OTHER; note = 2'-fluoroguanosine-3'-phosphate
  modified_base 11: mod_base = OTHER; note = 2'-fluorocytidine-3'-phosphate
  modified_base 12: mod_base = OTHER; note = 2'-O-methylguanosine-3'-phosphate
  modified_base 13: mod_base = OTHER; note = 2'-O-methylcytidine-3'-phosphate
  modified_base 14: mod_base = OTHER; note = 2'-O-methyladenosine-3'-phosphate
  modified_base 15: mod_base = OTHER; note = 2'-O-methyluridine-3'-phosphate
  modified_base 16: mod_base = OTHER; note = 2'-O-methyluridine-3'-phosphate
  modified_base 17: mod_base = OTHER; note = 2'-O-methyluridine-3'-phosphate
  modified_base 18: mod_base = OTHER; note = 2'-O-methylcytidine-3'-phosphate
  modified_base 19: mod_base = OTHER; note = 2'-O-methyluridine-3'-phosphate
  modified_base 20: mod_base = OTHER; note = 2'-O-methylcytidine-3'-phosphate
  modified_base 21: mod_base = OTHER; note 2'-O-methyluridine-3'-phosphate-N-[tris(GalNAc-alkyl)-amido decanoyl)]-4-hydroxyprolinol (Hyp-(GalNAc-alkyl)3)
ggctctcaggcgcatttctct

SEQ ID NO: 4941 - RNA, 21 nt, synthetic construct
  source 1..21: mol_type = other RNA
  modified_base 1: mod_base = OTHER; note = 2'-O-methyluridine-3'-phosphorothioate
  modified_base 2: mod_base = OTHER; note = 2'-O-methylcytidine-3'- phosphorothioate
  modified_base 3: mod_base = OTHER; note = 2'-O-methyladenosine-3'-phosphate
  modified_base 4: mod_base = OTHER; note = 2'-O-methylguanosine-3'-phosphate
  modified_base 5: mod_base = OTHER; note = 2'-O-methylguanosine-3'-phosphate
  modified_base 6: mod_base = OTHER; note = 2'-O-methylcytidine-3'-phosphate
  modified_base 7: mod_base = OTHER; note = 2'-fluoroguanosine-3'-phosphate
  modified_base 8: mod_base = OTHER; note = 2'-O-methylcytidine-3'-phosphate
  modified_base 9: mod_base = OTHER; note = 2'-fluoroadenosine-3'-phosphate
  modified_base 10: mod_base = OTHER; note = 2'-fluorouridine-3'-phosphate
  modified_base 11: mod_base = OTHER; note = 2'-fluorouridine-3'-phosphate
  modified_base 12: mod_base = OTHER; note = 2'-O-methyluridine-3'-phosphate
  modified_base 13: mod_base = OTHER; note = 2'-O-methylcytidine-3'-phosphate
  modified_base 14: mod_base = OTHER; note = 2'-O-methyluridine-3'-phosphate
  modified_base 15: mod_base = OTHER; note = 2'-O-methylcytidine-3'-phosphate
  modified_base 16: mod_base = OTHER; note = 2'-O-methylcytidine-3'-phosphate
  modified_base 17: mod_base = OTHER; note = 2'-O-methylguanosine-3'-phosphate
  modified_base 18: mod_base = OTHER; note = 2'-O-methyladenosine-3'-phosphate
  modified_base 19: mod_base = OTHER; note = 2'-O-methylguanosine-3'-phosphate
  modified_base 20: mod_base = OTHER; note = 2'-O-methylcytidine-3'-phosphate
  modified_base 21: mod_base = OTHER; note 2'-O-methyluridine-3'-phosphate-N-[tris(GalNAc-alkyl)-amido decanoyl)]-4-hydroxyprolinol (Hyp-(GalNAc-alkyl)3)
tcaggcgcatttctccgagct

SEQ ID NO: 4942 - RNA, 21 nt, synthetic construct
  source 1..21: mol_type = other RNA
  modified_base 1: mod_base = OTHER; note = 2'-O-methylcytidine-3'- phosphorothioate
  modified_base 2: mod_base = OTHER; note = 2'-O-methylguanosine-3'- phosphorothioate
  modified_base 3: mod_base = OTHER; note = 2'-O-methylcytidine-3'-phosphate
  modified_base 4: mod_base = OTHER; note = 2'-O-methyladenosine-3'-phosphate
  modified_base 5: mod_base = OTHER; note = 2'-O-methyluridine-3'-phosphate
  modified_base 6: mod_base = OTHER; note = 2'-O-methyluridine-3'-phosphate
  modified_base 7: mod_base = OTHER; note = 2'-fluorouridine-3'-phosphate
  modified_base 8: mod_base = OTHER; note = 2'-O-methylcytidine-3'-phosphate
  modified_base 9: mod_base = OTHER; note = 2'-fluorouridine-3'-phosphate
  modified_base 10: mod_base = OTHER; note = 2'-fluorocytidine-3'-phosphate
  modified_base 11: mod_base = OTHER; note = 2'-fluorocytidine-3'-phosphate
  modified_base 12: mod_base = OTHER; note = 2'-O-methylguanosine-3'-phosphate
  modified_base 13: mod_base = OTHER; note = 2'-O-methyladenosine-3'-phosphate
  modified_base 14: mod_base = OTHER; note = 2'-O-methylguanosine-3'-phosphate
  modified_base 15: mod_base = OTHER; note = 2'-O-methylcytidine-3'-phosphate
  modified_base 16: mod_base = OTHER; note = 2'-O-methyladenosine-3'-phosphate
  modified_base 17: mod_base = OTHER; note = 2'-O-methyluridine-3'-phosphate
  modified_base 18: mod_base = OTHER; note = 2'-O-methylcytidine-3'-phosphate
  modified_base 19: mod_base = OTHER; note = 2'-O-methylcytidine-3'-phosphate
  modified_base 20: mod_base = OTHER; note = 2'-O-methylguanosine-3'-phosphate
  modified_base 21: mod_base = OTHER; note 2'-O-methyluridine-3'-phosphate-N-[tris(GalNAc-alkyl)-amido decanoyl)]-4-hydroxyprolinol (Hyp-(GalNAc-alkyl)3)
cgcatttctccgagcatccgt

SEQ ID NO: 4943 - RNA, 21 nt, synthetic construct
  source 1..21: mol_type = other RNA
  modified_base 1: mod_base = OTHER; note = 2'-O-methyluridine-3'-phosphorothioate
  modified_base 2: mod_base = OTHER; note = 2'-O-methyluridine-3'-phosphorothioate
  modified_base 3: mod_base = OTHER; note = 2'-O-methylcytidine-3'-phosphate
  modified_base 4: mod_base = OTHER; note = 2'-O-methyluridine-3'-phosphate
  modified_base 5: mod_base = OTHER; note = 2'-O-methylcytidine-3'-phosphate
  modified_base 6: mod_base = OTHER; note = 2'-O-methylcytidine-3'-phosphate
  modified_base 7: mod_base = OTHER; note = 2'-fluoroguanosine-3'-phosphate
  modified_base 8: mod_base = OTHER; note = 2'-O-methyladenosine-3'-phosphate
  modified_base 9: mod_base = OTHER; note = 2'-fluoroguanosine-3'-phosphate
  modified_base 10: mod_base = OTHER; note = 2'-fluorocytidine-3'-phosphate
  modified_base 11: mod_base = OTHER; note = 2'-fluoroadenosine-3'-phosphate
  modified_base 12: mod_base = OTHER; note = 2'-O-methyluridine-3'-phosphate
  modified_base 13: mod_base = OTHER; note = 2'-O-methylcytidine-3'-phosphate
  modified_base 14: mod_base = OTHER; note = 2'-O-methylcytidine-3'-phosphate
  modified_base 15: mod_base = OTHER; note = 2'-O-methylguanosine-3'-phosphate
  modified_base 16: mod_base = OTHER; note = 2'-O-methyluridine-3'-phosphate
  modified_base 17: mod_base = OTHER; note = 2'-O-methylcytidine-3'-phosphate
  modified_base 18: mod_base = OTHER; note = 2'-O-methyluridine-3'-phosphate
  modified_base 19: mod_base = OTHER; note = 2'-O-methyladenosine-3'-phosphate
  modified_base 20: mod_base = OTHER; note = 2'-O-methyluridine-3'-phosphate
  modified_base 21: mod_base = OTHER; note 2'-O-methyluridine-3'-phosphate-N-[tris(GalNAc-alkyl)-amido decanoyl)]-4-hydroxyprolinol (Hyp-(GalNAc-alkyl)3)
ttctccgagcatccgtctatt

SEQ ID NO: 4944 - RNA, 21 nt, synthetic construct
  source 1..21: mol_type = other RNA
  modified_base 1: mod_base = OTHER; note = 2'-O-methylguanosine-3'- phosphorothioate
  modified_base 2: mod_base = OTHER; note = 2'-O-methyladenosine-3'- phosphorothioate
  modified_base 3: mod_base = OTHER; note = 2'-O-methylguanosine-3'-phosphate
  modified_base 4: mod_base = OTHER; note = 2'-O-methylcytidine-3'-phosphate
  modified_base 5: mod_base = OTHER; note = 2'-O-methyladenosine-3'-phosphate
  modified_base 6: mod_base = OTHER; note = 2'-O-methyluridine-3'-phosphate
  modified_base 7: mod_base = OTHER; note = 2'-fluorocytidine-3'-phosphate
  modified_base 8: mod_base = OTHER; note = 2'-O-methylcytidine-3'-phosphate
  modified_base 9: mod_base = OTHER; note = 2'-fluoroguanosine-3'-phosphate
  modified_base 10: mod_base = OTHER; note = 2'-fluorouridine-3'-phosphate
  modified_base 11: mod_base = OTHER; note = 2'-fluorocytidine-3'-phosphate
  modified_base 12: mod_base = OTHER; note = 2'-O-methyluridine-3'-phosphate
  modified_base 13: mod_base = OTHER; note = 2'-O-methyladenosine-3'-phosphate
  modified_base 14: mod_base = OTHER; note = 2'-O-methyluridine-3'-phosphate
  modified_base 15: mod_base = OTHER; note = 2'-O-methylguanosine-3'-phosphate
  modified_base 16: mod_base = OTHER; note = 2'-O-methylguanosine-3'-phosphate
  modified_base 17: mod_base = OTHER; note = 2'-O-methylguanosine-3'-phosphate
  modified_base 18: mod_base = OTHER; note = 2'-O-methylcytidine-3'-phosphate
  modified_base 19: mod_base = OTHER; note = 2'-O-methyladenosine-3'-phosphate
  modified_base 20: mod_base = OTHER; note = 2'-O-methylguanosine-3'-phosphate
  modified_base 21: mod_base = OTHER; note 2'-O-methyluridine-3'-phosphate-N-[tris(GalNAc-alkyl)-amido decanoyl)]-4-hydroxyprolinol (Hyp-(GalNAc-alkyl)3)
gagcatccgtctatgggcagt

SEQ ID NO: 4945 - RNA, 21 nt, synthetic construct
  source 1..21: mol_type = other RNA
  modified_base 1: mod_base = OTHER; note = 2'-O-methyluridine-3'-phosphorothioate
  modified_base 2: mod_base = OTHER; note = 2'-O-methylcytidine-3'- phosphorothioate
  modified_base 3: mod_base = OTHER; note = 2'-O-methylcytidine-3'-phosphate
  modified_base 4: mod_base = OTHER; note = 2'-O-methylguanosine-3'-phosphate
  modified_base 5: mod_base = OTHER; note = 2'-O-methyluridine-3'-phosphate
  modified_base 6: mod_base = OTHER; note = 2'-O-methylcytidine-3'-phosphate
  modified_base 7: mod_base = OTHER; note = 2'-fluorouridine-3'-phosphate
  modified_base 8: mod_base = OTHER; note = 2'-O-methyladenosine-3'-phosphate
  modified_base 9: mod_base = OTHER; note = 2'-fluorouridine-3'-phosphate
  modified_base 10: mod_base = OTHER; note = 2'-fluoroguanosine-3'-phosphate
  modified_base 11: mod_base = OTHER; note = 2'-fluoroguanosine-3'-phosphate
  modified_base 12: mod_base = OTHER; note = 2'-O-methylguanosine-3'-phosphate
  modified_base 13: mod_base = OTHER; note = 2'-O-methylcytidine-3'-phosphate
  modified_base 14: mod_base = OTHER; note = 2'-O-methyladenosine-3'-phosphate
  modified_base 15: mod_base = OTHER; note = 2'-O-methylguanosine-3'-phosphate
  modified_base 16: mod_base = OTHER; note = 2'-O-methyluridine-3'-phosphate
  modified_base 17: mod_base = OTHER; note = 2'-O-methyluridine-3'-phosphate
  modified_base 18: mod_base = OTHER; note = 2'-O-methyluridine-3'-phosphate
  modified_base 19: mod_base = OTHER; note = 2'-O-methylguanosine-3'-phosphate
  modified_base 20: mod_base = OTHER; note = 2'-O-methyluridine-3'-phosphate
  modified_base 21: mod_base = OTHER; note 2'-O-methyluridine-3'-phosphate-N-[tris(GalNAc-alkyl)-amido decanoyl)]-4-hydroxyprolinol (Hyp-(GalNAc-alkyl)3)
tccgtctatgggcagtttgtt

SEQ ID NO: 4946 - RNA, 21 nt, synthetic construct
  source 1..21: mol_type = other RNA
  modified_base 1: mod_base = OTHER; note = 2'-O-methyluridine-3'-phosphorothioate
  modified_base 2: mod_base = OTHER; note = 2'-O-methyladenosine-3'- phosphorothioate
  modified_base 3: mod_base = OTHER; note = 2'-O-methyluridine-3'-phosphate
  modified_base 4: mod_base = OTHER; note = 2'-O-methylguanosine-3'-phosphate
  modified_base 5: mod_base = OTHER; note = 2'-O-methylguanosine-3'-phosphate
  modified_base 6: mod_base = OTHER; note = 2'-O-methylguanosine-3'-phosphate
  modified_base 7: mod_base = OTHER; note = 2'-fluorocytidine-3'-phosphate
  modified_base 8: mod_base = OTHER; note = 2'-O-methyladenosine-3'-phosphate
  modified_base 9: mod_base = OTHER; note = 2'-fluoroguanosine-3'-phosphate
  modified_base 10: mod_base = OTHER; note = 2'-fluorouridine-3'-phosphate
  modified_base 11: mod_base = OTHER; note = 2'-fluorouridine-3'-phosphate
  modified_base 12: mod_base = OTHER; note = 2'-O-methyluridine-3'-phosphate
  modified_base 13: mod_base = OTHER; note = 2'-O-methylguanosine-3'-phosphate
  modified_base 14: mod_base = OTHER; note = 2'-O-methyluridine-3'-phosphate
  modified_base 15: mod_base = OTHER; note = 2'-O-methylguanosine-3'-phosphate
  modified_base 16: mod_base = OTHER; note = 2'-O-methylguanosine-3'-phosphate
  modified_base 17: mod_base = OTHER; note = 2'-O-methylcytidine-3'-phosphate
  modified_base 18: mod_base = OTHER; note = 2'-O-methyluridine-3'-phosphate
  modified_base 19: mod_base = OTHER; note = 2'-O-methylguanosine-3'-phosphate
  modified_base 20: mod_base = OTHER; note = 2'-O-methylguanosine-3'-phosphate
  modified_base 21: mod_base = OTHER; note 2'-O-methyluridine-3'-phosphate-N-[tris(GalNAc-alkyl)-amido decanoyl)]-4-hydroxyprolinol (Hyp-(GalNAc-alkyl)3)
tatgggcagtttgtggctggt

SEQ ID NO: 4947 - RNA, 21 nt, synthetic construct
  source 1..21: mol_type = other RNA
  modified_base 1: mod_base = OTHER; note = 2'-O-methylcytidine-3'- phosphorothioate
  modified_base 2: mod_base = OTHER; note = 2'-O-methyladenosine-3'- phosphorothioate
  modified_base 3: mod_base = OTHER; note = 2'-O-methylguanosine-3'-phosphate
  modified_base 4: mod_base = OTHER; note = 2'-O-methyluridine-3'-phosphate
  modified_base 5: mod_base = OTHER; note = 2'-O-methyluridine-3'-phosphate
  modified_base 6: mod_base = OTHER; note = 2'-O-methyluridine-3'-phosphate
  modified_base 7: mod_base = OTHER; note = 2'-fluoroguanosine-3'-phosphate
  modified_base 8: mod_base = OTHER; note = 2'-O-methyluridine-3'-phosphate
  modified_base 9: mod_base = OTHER; note = 2'-fluoroguanosine-3'-phosphate
  modified_base 10: mod_base = OTHER; note = 2'-fluoroguanosine-3'-phosphate
  modified_base 11: mod_base = OTHER; note = 2'-fluorocytidine-3'-phosphate
  modified_base 12: mod_base = OTHER; note = 2'-O-methyluridine-3'-phosphate
  modified_base 13: mod_base = OTHER; note = 2'-O-methylguanosine-3'-phosphate
  modified_base 14: mod_base = OTHER; note = 2'-O-methylguanosine-3'-phosphate
  modified_base 15: mod_base = OTHER; note = 2'-O-methyluridine-3'-phosphate
  modified_base 16: mod_base = OTHER; note = 2'-O-methylguanosine-3'-phosphate
  modified_base 17: mod_base = OTHER; note = 2'-O-methyladenosine-3'-phosphate
  modified_base 18: mod_base = OTHER; note = 2'-O-methylguanosine-3'-phosphate
  modified_base 19: mod_base = OTHER; note = 2'-O-methyladenosine-3'-phosphate
  modified_base 20: mod_base = OTHER; note = 2'-O-methylcytidine-3'-phosphate
  modified_base 21: mod_base = OTHER; note 2'-O-methyluridine-3'-phosphate-N-[tris(GalNAc-alkyl)-amido decanoyl)]-4-hydroxyprolinol (Hyp-(GalNAc-alkyl)3)
cagtttgtggctggtgagact

SEQ ID NO: 4948 - RNA, 21 nt, synthetic construct
  source 1..21: mol_type = other RNA
  modified_base 1: mod_base = OTHER; note = 2'-O-methyluridine-3'-phosphorothioate
  modified_base 2: mod_base = OTHER; note = 2'-O-methylguanosine-3'- phosphorothioate
  modified_base 3: mod_base = OTHER; note = 2'-O-methylguanosine-3'-phosphate
  modified_base 4: mod_base = OTHER; note = 2'-O-methylcytidine-3'-phosphate
  modified_base 5: mod_base = OTHER; note = 2'-O-methyluridine-3'-phosphate
  modified_base 6: mod_base = OTHER; note = 2'-O-methylguanosine-3'-phosphate
  modified_base 7: mod_base = OTHER; note = 2'-fluoroguanosine-3'-phosphate
  modified_base 8: mod_base = OTHER; note = 2'-O-methyluridine-3'-phosphate
  modified_base 9: mod_base = OTHER; note = 2'-fluoroguanosine-3'-phosphate
  modified_base 10: mod_base = OTHER; note = 2'-fluoroadenosine-3'-phosphate
  modified_base 11: mod_base = OTHER; note = 2'-fluoroguanosine-3'-phosphate
  modified_base 12: mod_base = OTHER; note = 2'-O-methyladenosine-3'-phosphate
  modified_base 13: mod_base = OTHER; note = 2'-O-methylcytidine-3'-phosphate
  modified_base 14: mod_base = OTHER; note = 2'-O-methyladenosine-3'-phosphate
  modified_base 15: mod_base = OTHER; note = 2'-O-methylguanosine-3'-phosphate
  modified_base 16: mod_base = OTHER; note = 2'-O-methylcytidine-3'-phosphate
  modified_base 17: mod_base = OTHER; note = 2'-O-methyladenosine-3'-phosphate
  modified_base 18: mod_base = OTHER; note = 2'-O-methylguanosine-3'-phosphate
  modified_base 19: mod_base = OTHER; note = 2'-O-methyladenosine-3'-phosphate
  modified_base 20: mod_base = OTHER; note = 2'-O-methylguanosine-3'-phosphate
  modified_base 21: mod_base = OTHER; note 2'-O-methyluridine-3'-phosphate-N-[tris(GalNAc-alkyl)-amido decanoyl)]-4-hydroxyprolinol (Hyp-(GalNAc-alkyl)3)
tggctggtgagacagcagagt

SEQ ID NO: 4949 - RNA, 21 nt, synthetic construct
  source 1..21: mol_type = other RNA
  modified_base 1: mod_base = OTHER; note = 2'-O-methylguanosine-3'- phosphorothioate
  modified_base 2: mod_base = OTHER; note = 2'-O-methyluridine-3'-phosphorothioate
  modified_base 3: mod_base = OTHER; note = 2'-O-methylguanosine-3'-phosphate
  modified_base 4: mod_base = OTHER; note = 2'-O-methyladenosine-3'-phosphate
  modified_base 5: mod_base = OTHER; note = 2'-O-methylguanosine-3'-phosphate
  modified_base 6: mod_base = OTHER; note = 2'-O-methyladenosine-3'-phosphate
  modified_base 7: mod_base = OTHER; note = 2'-fluorocytidine-3'-phosphate
  modified_base 8: mod_base = OTHER; note = 2'-O-methyladenosine-3'-phosphate
  modified_base 9: mod_base = OTHER; note = 2'-fluoroguanosine-3'-phosphate
  modified_base 10: mod_base = OTHER; note = 2'-fluorocytidine-3'-phosphate
  modified_base 11: mod_base = OTHER; note = 2'-fluoroadenosine-3'-phosphate
  modified_base 12: mod_base = OTHER; note = 2'-O-methylguanosine-3'-phosphate
  modified_base 13: mod_base = OTHER; note = 2'-O-methyladenosine-3'-phosphate
  modified_base 14: mod_base = OTHER; note = 2'-O-methylguanosine-3'-phosphate
  modified_base 15: mod_base = OTHER; note = 2'-O-methylguanosine-3'-phosphate
  modified_base 16: mod_base = OTHER; note = 2'-O-methyladenosine-3'-phosphate
  modified_base 17: mod_base = OTHER; note = 2'-O-methylguanosine-3'-phosphate
  modified_base 18: mod_base = OTHER; note = 2'-O-methylguanosine-3'-phosphate
  modified_base 19: mod_base = OTHER; note = 2'-O-methyluridine-3'-phosphate
  modified_base 20: mod_base = OTHER; note = 2'-O-methylguanosine-3'-phosphate
  modified_base 21: mod_base = OTHER; note 2'-O-methyluridine-3'-phosphate-N-[tris(GalNAc-alkyl)-amido decanoyl)]-4-hydroxyprolinol (Hyp-(GalNAc-alkyl)3)
gtgagacagcagaggaggtgt

SEQ ID NO: 4950 - RNA, 21 nt, synthetic construct
  source 1..21: mol_type = other RNA
  modified_base 1: mod_base = OTHER; note = 2'-O-methyladenosine-3'- phosphorothioate
  modified_base 2: mod_base = OTHER; note = 2'-O-methylguanosine-3'- phosphorothioate
  modified_base 3: mod_base = OTHER; note = 2'-O-methylcytidine-3'-phosphate
  modified_base 4: mod_base = OTHER; note = 2'-O-methyladenosine-3'-phosphate
  modified_base 5: mod_base = OTHER; note = 2'-O-methylguanosine-3'-phosphate
  modified_base 6: mod_base = OTHER; note = 2'-O-methyladenosine-3'-phosphate
  modified_base 7: mod_base = OTHER; note = 2'-fluoroguanosine-3'-phosphate
  modified_base 8: mod_base = OTHER; note = 2'-O-methylguanosine-3'-phosphate
  modified_base 9: mod_base = OTHER; note = 2'-fluoroadenosine-3'-phosphate
  modified_base 10: mod_base = OTHER; note = 2'-fluoroguanosine-3'-phosphate
  modified_base 11: mod_base = OTHER; note = 2'-fluoroguanosine-3'-phosphate
  modified_base 12: mod_base = OTHER; note = 2'-O-methyluridine-3'-phosphate
  modified_base 13: mod_base = OTHER; note = 2'-O-methylguanosine-3'-phosphate
  modified_base 14: mod_base = OTHER; note = 2'-O-methyladenosine-3'-phosphate
  modified_base 15: mod_base = OTHER; note = 2'-O-methyladenosine-3'-phosphate
  modified_base 16: mod_base = OTHER; note = 2'-O-methylguanosine-3'-phosphate
  modified_base 17: mod_base = OTHER; note = 2'-O-methylguanosine-3'-phosphate
  modified_base 18: mod_base = OTHER; note = 2'-O-methylguanosine-3'-phosphate
  modified_base 19: mod_base = OTHER; note = 2'-O-methylcytidine-3'-phosphate
  modified_base 20: mod_base = OTHER; note = 2'-O-methyluridine-3'-phosphate
  modified_base 21: mod_base = OTHER; note 2'-O-methyluridine-3'-phosphate-N-[tris(GalNAc-alkyl)-amido decanoyl)]-4-hydroxyprolinol (Hyp-(GalNAc-alkyl)3)
agcagaggaggtgaagggctt

SEQ ID NO: 4951 - RNA, 21 nt, synthetic construct
  source 1..21: mol_type = other RNA
  modified_base 1: mod_base = OTHER; note = 2'-O-methylguanosine-3'- phosphorothioate
  modified_base 2: mod_base = OTHER; note = 2'-O-methyladenosine-3'- phosphorothioate
  modified_base 3: mod_base = OTHER; note = 2'-O-methylguanosine-3'-phosphate
  modified_base 4: mod_base = OTHER; note = 2'-O-methylguanosine-3'-phosphate
  modified_base 5: mod_base = OTHER; note = 2'-O-methyluridine-3'-phosphate
  modified_base 6: mod_base = OTHER; note = 2'-O-methylguanosine-3'-phosphate
  modified_base 7: mod_base = OTHER; note = 2'-fluoroadenosine-3'-phosphate
  modified_base 8: mod_base = OTHER; note = 2'-O-methyladenosine-3'-phosphate
  modified_base 9: mod_base = OTHER; note = 2'-fluoroguanosine-3'-phosphate
  modified_base 10: mod_base = OTHER; note = 2'-fluoroguanosine-3'-phosphate
  modified_base 11: mod_base = OTHER; note = 2'-fluoroguanosine-3'-phosphate
  modified_base 12: mod_base = OTHER; note = 2'-O-methylcytidine-3'-phosphate
  modified_base 13: mod_base = OTHER; note = 2'-O-methyluridine-3'-phosphate
  modified_base 14: mod_base = OTHER; note = 2'-O-methylguanosine-3'-phosphate
  modified_base 15: mod_base = OTHER; note = 2'-O-methylcytidine-3'-phosphate
  modified_base 16: mod_base = OTHER; note = 2'-O-methylguanosine-3'-phosphate
  modified_base 17: mod_base = OTHER; note = 2'-O-methyluridine-3'-phosphate
  modified_base 18: mod_base = OTHER; note = 2'-O-methylguanosine-3'-phosphate
  modified_base 19: mod_base = OTHER; note = 2'-O-methylcytidine-3'-phosphate
  modified_base 20: mod_base = OTHER; note = 2'-O-methyladenosine-3'-phosphate
  modified_base 21: mod_base = OTHER; note 2'-O-methyluridine-3'-phosphate-N-[tris(GalNAc-alkyl)-amido decanoyl)]-4-hydroxyprolinol (Hyp-(GalNAc-alkyl)3)
gaggtgaagggctgcgtgcat

SEQ ID NO: 4952 - RNA, 21 nt, synthetic construct
  source 1..21: mol_type = other RNA
  modified_base 1: mod_base = OTHER; note = 2'-O-methyladenosine-3'- phosphorothioate
  modified_base 2: mod_base = OTHER; note = 2'-O-methyladenosine-3'- phosphorothioate
  modified_base 3: mod_base = OTHER; note = 2'-O-methylguanosine-3'-phosphate
  modified_base 4: mod_base = OTHER; note = 2'-O-methylguanosine-3'-phosphate
  modified_base 5: mod_base = OTHER; note = 2'-O-methylguanosine-3'-phosphate
  modified_base 6: mod_base = OTHER; note = 2'-O-methylcytidine-3'-phosphate
  modified_base 7: mod_base = OTHER; note = 2'-fluorouridine-3'-phosphate
  modified_base 8: mod_base = OTHER; note = 2'-O-methylguanosine-3'-phosphate
  modified_base 9: mod_base = OTHER; note = 2'-fluorocytidine-3'-phosphate
  modified_base 10: mod_base = OTHER; note = 2'-fluoroguanosine-3'-phosphate
  modified_base 11: mod_base = OTHER; note = 2'-fluorouridine-3'-phosphate
  modified_base 12: mod_base = OTHER; note = 2'-O-methylguanosine-3'-phosphate
  modified_base 13: mod_base = OTHER; note = 2'-O-methylcytidine-3'-phosphate
  modified_base 14: mod_base = OTHER; note = 2'-O-methyladenosine-3'-phosphate
  modified_base 15: mod_base = OTHER; note = 2'-O-methylguanosine-3'-phosphate
  modified_base 16: mod_base = OTHER; note = 2'-O-methylcytidine-3'-phosphate
  modified_base 17: mod_base = OTHER; note = 2'-O-methyladenosine-3'-phosphate
  modified_base 18: mod_base = OTHER; note = 2'-O-methylguanosine-3'-phosphate
  modified_base 19: mod_base = OTHER; note = 2'-O-methylcytidine-3'-phosphate
  modified_base 20: mod_base = OTHER; note = 2'-O-methyluridine-3'-phosphate
  modified_base 21: mod_base = OTHER; note 2'-O-methyluridine-3'-phosphate-N-[tris(GalNAc-alkyl)-amido decanoyl)]-4-hydroxyprolinol (Hyp-(GalNAc-alkyl)3)
aagggctgcgtgcagcagctt

SEQ ID NO: 4953 - RNA, 21 nt, synthetic construct
  source 1..21: mol_type = other RNA
  modified_base 1: mod_base = OTHER; note = 2'-O-methyluridine-3'-phosphorothioate
  modified_base 2: mod_base = OTHER; note = 2'-O-methylguanosine-3'- phosphorothioate
  modified_base 3: mod_base = OTHER; note = 2'-O-methylcytidine-3'-phosphate
  modified_base 4: mod_base = OTHER; note = 2'-O-methyluridine-3'-phosphate
  modified_base 5: mod_base = OTHER; note = 2'-O-methylguanosine-3'-phosphate
  modified_base 6: mod_base = OTHER; note = 2'-O-methylguanosine-3'-phosphate
  modified_base 7: mod_base = OTHER; note = 2'-fluorocytidine-3'-phosphate
  modified_base 8: mod_base = OTHER; note = 2'-O-methyladenosine-3'-phosphate
  modified_base 9: mod_base = OTHER; note = 2'-fluoroguanosine-3'-phosphate
  modified_base 10: mod_base = OTHER; note = 2'-fluorouridine-3'-phosphate
  modified_base 11: mod_base = OTHER; note = 2'-fluoroguanosine-3'-phosphate
  modified_base 12: mod_base = OTHER; note = 2'-O-methylcytidine-3'-phosphate
  modified_base 13: mod_base = OTHER; note = 2'-O-methylcytidine-3'-phosphate
  modified_base 14: mod_base = OTHER; note = 2'-O-methylcytidine-3'-phosphate
  modified_base 15: mod_base = OTHER; note = 2'-O-methyladenosine-3'-phosphate
  modified_base 16: mod_base = OTHER; note = 2'-O-methylcytidine-3'-phosphate
  modified_base 17: mod_base = OTHER; note = 2'-O-methyluridine-3'-phosphate
  modified_base 18: mod_base = OTHER; note = 2'-O-methylguanosine-3'-phosphate
  modified_base 19: mod_base = OTHER; note = 2'-O-methyladenosine-3'-phosphate
  modified_base 20: mod_base = OTHER; note = 2'-O-methylguanosine-3'-phosphate
  modified_base 21: mod_base = OTHER; note 2'-O-methyluridine-3'-phosphate-N-[tris(GalNAc-alkyl)-amido decanoyl)]-4-hydroxyprolinol (Hyp-(GalNAc-alkyl)3)
tgctggcagtgcccactgagt

SEQ ID NO: 4954 - RNA, 21 nt, synthetic construct
  source 1..21: mol_type = other RNA
  modified_base 1: mod_base = OTHER; note = 2'-O-methylguanosine-3'- phosphorothioate
  modified_base 2: mod_base = OTHER; note = 2'-O-methylcytidine-3'- phosphorothioate
  modified_base 3: mod_base = OTHER; note = 2'-O-methyladenosine-3'-phosphate
  modified_base 4: mod_base = OTHER; note = 2'-O-methylguanosine-3'-phosphate
  modified_base 5: mod_base = OTHER; note = 2'-O-methyluridine-3'-phosphate
  modified_base 6: mod_base = OTHER; note = 2'-O-methylguanosine-3'-phosphate
  modified_base 7: mod_base = OTHER; note = 2'-fluorocytidine-3'-phosphate
  modified_base 8: mod_base = OTHER; note = 2'-O-methylcytidine-3'-phosphate
  modified_base 9: mod_base = OTHER; note = 2'-fluorocytidine-3'-phosphate
  modified_base 10: mod_base = OTHER; note = 2'-fluoroadenosine-3'-phosphate
  modified_base 11: mod_base = OTHER; note = 2'-fluorocytidine-3'-phosphate
  modified_base 12: mod_base = OTHER; note = 2'-O-methyluridine-3'-phosphate
  modified_base 13: mod_base = OTHER; note = 2'-O-methylguanosine-3'-phosphate
  modified_base 14: mod_base = OTHER; note = 2'-O-methyladenosine-3'-phosphate
  modified_base 15: mod_base = OTHER; note = 2'-O-methylguanosine-3'-phosphate
  modified_base 16: mod_base = OTHER; note = 2'-O-methylguanosine-3'-phosphate
  modified_base 17: mod_base = OTHER; note = 2'-O-methyladenosine-3'-phosphate
  modified_base 18: mod_base = OTHER; note = 2'-O-methylguanosine-3'-phosphate
  modified_base 19: mod_base = OTHER; note = 2'-O-methylguanosine-3'-phosphate
  modified_base 20: mod_base = OTHER; note = 2'-O-methyladenosine-3'-phosphate
  modified_base 21: mod_base = OTHER; note 2'-O-methyluridine-3'-phosphate-N-[tris(GalNAc-alkyl)-amido decanoyl)]-4-hydroxyprolinol (Hyp-(GalNAc-alkyl)3)
gcagtgcccactgaggaggat

SEQ ID NO: 4955 - RNA, 21 nt, synthetic construct
  source 1..21: mol_type = other RNA
  modified_base 1: mod_base = OTHER; note = 2'-O-methylcytidine-3'- phosphorothioate
  modified_base 2: mod_base = OTHER; note = 2'-O-methyluridine-3'-phosphorothioate
  modified_base 3: mod_base = OTHER; note = 2'-O-methylguanosine-3'-phosphate
  modified_base 4: mod_base = OTHER; note = 2'-O-methyladenosine-3'-phosphate
  modified_base 5: mod_base = OTHER; note = 2'-O-methylguanosine-3'-phosphate
  modified_base 6: mod_base = OTHER; note = 2'-O-methylguanosine-3'-phosphate
  modified_base 7: mod_base = OTHER; note = 2'-fluoroadenosine-3'-phosphate
  modified_base 8: mod_base = OTHER; note = 2'-O-methylguanosine-3'-phosphate
  modified_base 9: mod_base = OTHER; note = 2'-fluoroguanosine-3'-phosphate
  modified_base 10: mod_base = OTHER; note = 2'-fluoroadenosine-3'-phosphate
  modified_base 11: mod_base = OTHER; note = 2'-fluoroguanosine-3'-phosphate
  modified_base 12: mod_base = OTHER; note = 2'-O-methylcytidine-3'-phosphate
  modified_base 13: mod_base = OTHER; note = 2'-O-methylcytidine-3'-phosphate
  modified_base 14: mod_base = OTHER; note = 2'-O-methylguanosine-3'-phosphate
  modified_base 15: mod_base = OTHER; note = 2'-O-methylguanosine-3'-phosphate
  modified_base 16: mod_base = OTHER; note = 2'-O-methyladenosine-3'-phosphate
  modified_base 17: mod_base = OTHER; note = 2'-O-methylcytidine-3'-phosphate
  modified_base 18: mod_base = OTHER; note = 2'-O-methyluridine-3'-phosphate
  modified_base 19: mod_base = OTHER; note = 2'-O-methylcytidine-3'-phosphate
  modified_base 20: mod_base = OTHER; note = 2'-O-methyluridine-3'-phosphate
  modified_base 21: mod_base = OTHER; note 2'-O-methyluridine-3'-phosphate-N-[tris(GalNAc-alkyl)-amido decanoyl)]-4-hydroxyprolinol (Hyp-(GalNAc-alkyl)3)
ctgaggaggagccggactctt

SEQ ID NO: 4956 - RNA, 21 nt, synthetic construct
  source 1..21: mol_type = other RNA
  modified_base 1: mod_base = OTHER; note = 2'-O-methylguanosine-3'- phosphorothioate
  modified_base 2: mod_base = OTHER; note = 2'-O-methyladenosine-3'- phosphorothioate
  modified_base 3: mod_base = OTHER; note = 2'-O-methylguanosine-3'-phosphate
  modified_base 4: mod_base = OTHER; note = 2'-O-methylcytidine-3'-phosphate
  modified_base 5: mod_base = OTHER; note = 2'-O-methylcytidine-3'-phosphate
  modified_base 6: mod_base = OTHER; note = 2'-O-methylguanosine-3'-phosphate
  modified_base 7: mod_base = OTHER; note = 2'-fluoroguanosine-3'-phosphate
  modified_base 8: mod_base = OTHER; note = 2'-O-methyladenosine-3'-phosphate
  modified_base 9: mod_base = OTHER; note = 2'-fluorocytidine-3'-phosphate
  modified_base 10: mod_base = OTHER; note = 2'-fluorouridine-3'-phosphate
  modified_base 11: mod_base = OTHER; note = 2'-fluorocytidine-3'-phosphate
  modified_base 12: mod_base = OTHER; note = 2'-O-methyluridine-3'-phosphate
  modified_base 13: mod_base = OTHER; note = 2'-O-methylguanosine-3'-phosphate
  modified_base 14: mod_base = OTHER; note = 2'-O-methylcytidine-3'-phosphate
  modified_base 15: mod_base = OTHER; note = 2'-O-methyluridine-3'-phosphate
  modified_base 16: mod_base = OTHER; note = 2'-O-methylguanosine-3'-phosphate
  modified_base 17: mod_base = OTHER; note = 2'-O-methylcytidine-3'-phosphate
  modified_base 18: mod_base = OTHER; note = 2'-O-methylcytidine-3'-phosphate
  modified_base 19: mod_base = OTHER; note = 2'-O-methyladenosine-3'-phosphate
  modified_base 20: mod_base = OTHER; note = 2'-O-methyladenosine-3'-phosphate
  modified_base 21: mod_base = OTHER; note 2'-O-methyluridine-3'-phosphate-N-[tris(GalNAc-alkyl)-amido decanoyl)]-4-hydroxyprolinol (Hyp-(GalNAc-alkyl)3)
gagccggactctgctgccaat

SEQ ID NO: 4957 - RNA, 21 nt, synthetic construct
  source 1..21: mol_type = other RNA
  modified_base 1: mod_base = OTHER; note = 2'-O-methyladenosine-3'- phosphorothioate
  modified_base 2: mod_base = OTHER; note = 2'-O-methylcytidine-3'- phosphorothioate
  modified_base 3: mod_base = OTHER; note = 2'-O-methyluridine-3'-phosphate
  modified_base 4: mod_base = OTHER; note = 2'-O-methylcytidine-3'-phosphate
  modified_base 5: mod_base = OTHER; note = 2'-O-methyluridine-3'-phosphate
  modified_base 6: mod_base = OTHER; note = 2'-O-methylguanosine-3'-phosphate
  modified_base 7: mod_base = OTHER; note = 2'-fluorocytidine-3'-phosphate
  modified_base 8: mod_base = OTHER; note = 2'-O-methyluridine-3'-phosphate
  modified_base 9: mod_base = OTHER; note = 2'-fluoroguanosine-3'-phosphate
  modified_base 10: mod_base = OTHER; note = 2'-fluorocytidine-3'-phosphate
  modified_base 11: mod_base = OTHER; note = 2'-fluorocytidine-3'-phosphate
  modified_base 12: mod_base = OTHER; note = 2'-O-methyladenosine-3'-phosphate
  modified_base 13: mod_base = OTHER; note = 2'-O-methyladenosine-3'-phosphate
  modified_base 14: mod_base = OTHER; note = 2'-O-methylguanosine-3'-phosphate
  modified_base 15: mod_base = OTHER; note = 2'-O-methyladenosine-3'-phosphate
  modified_base 16: mod_base = OTHER; note = 2'-O-methylguanosine-3'-phosphate
  modified_base 17: mod_base = OTHER; note = 2'-O-methyluridine-3'-phosphate
  modified_base 18: mod_base = OTHER; note = 2'-O-methylguanosine-3'-phosphate
  modified_base 19: mod_base = OTHER; note = 2'-O-methylguanosine-3'-phosphate
  modified_base 20: mod_base = OTHER; note = 2'-O-methyluridine-3'-phosphate
  modified_base 21: mod_base = OTHER; note 2'-O-methyluridine-3'-phosphate-N-[tris(GalNAc-alkyl)-amido decanoyl)]-4-hydroxyprolinol (Hyp-(GalNAc-alkyl)3)
actctgctgccaagagtggtt

SEQ ID NO: 4958 - RNA, 21 nt, synthetic construct
  source 1..21: mol_type = other RNA
  modified_base 1: mod_base = OTHER; note = 2'-O-methylguanosine-3'- phosphorothioate
  modified_base 2: mod_base = OTHER; note = 2'-O-methylcytidine-3'- phosphorothioate
  modified_base 3: mod_base = OTHER; note = 2'-O-methyluridine-3'-phosphate
  modified_base 4: mod_base = OTHER; note = 2'-O-methylguanosine-3'-phosphate
  modified_base 5: mod_base = OTHER; note = 2'-O-methylcytidine-3'-phosphate
  modified_base 6: mod_base = OTHER; note = 2'-O-methylcytidine-3'-phosphate
  modified_base 7: mod_base = OTHER; note = 2'-fluoroadenosine-3'-phosphate
  modified_base 8: mod_base = OTHER; note = 2'-O-methyladenosine-3'-phosphate
  modified_base 9: mod_base = OTHER; note = 2'-fluoroguanosine-3'-phosphate
  modified_base 10: mod_base = OTHER; note = 2'-fluoroadenosine-3'-phosphate
  modified_base 11: mod_base = OTHER; note = 2'-fluoroguanosine-3'-phosphate
  modified_base 12: mod_base = OTHER; note = 2'-O-methyluridine-3'-phosphate
  modified_base 13: mod_base = OTHER; note = 2'-O-methylguanosine-3'-phosphate
  modified_base 14: mod_base = OTHER; note = 2'-O-methylguanosine-3'-phosphate
  modified_base 15: mod_base = OTHER; note = 2'-O-methyluridine-3'-phosphate
  modified_base 16: mod_base = OTHER; note = 2'-O-methylguanosine-3'-phosphate
  modified_base 17: mod_base = OTHER; note = 2'-O-methyladenosine-3'-phosphate
  modified_base 18: mod_base = OTHER; note = 2'-O-methylguanosine-3'-phosphate
  modified_base 19: mod_base = OTHER; note = 2'-O-methylguanosine-3'-phosphate
  modified_base 20: mod_base = OTHER; note = 2'-O-methylcytidine-3'-phosphate
  modified_base 21: mod_base = OTHER; note 2'-O-methyluridine-3'-phosphate-N-[tris(GalNAc-alkyl)-amido decanoyl)]-4-hydroxyprolinol (Hyp-(GalNAc-alkyl)3)
gctgccaagagtggtgaggct

SEQ ID NO: 4959 - RNA, 21 nt, synthetic construct
  source 1..21: mol_type = other RNA
  modified_base 1: mod_base = OTHER; note = 2'-O-methyladenosine-3'- phosphorothioate
  modified_base 2: mod_base = OTHER; note = 2'-O-methylguanosine-3'- phosphorothioate
  modified_base 3: mod_base = OTHER; note = 2'-O-methyluridine-3'-phosphate
  modified_base 4: mod_base = OTHER; note = 2'-O-methylguanosine-3'-phosphate
  modified_base 5: mod_base = OTHER; note = 2'-O-methylguanosine-3'-phosphate
  modified_base 6: mod_base = OTHER; note = 2'-O-methyluridine-3'-phosphate
  modified_base 7: mod_base = OTHER; note = 2'-fluoroguanosine-3'-phosphate
  modified_base 8: mod_base = OTHER; note = 2'-O-methyladenosine-3'-phosphate
  modified_base 9: mod_base = OTHER; note = 2'-fluoroguanosine-3'-phosphate
  modified_base 10: mod_base = OTHER; note = 2'-fluoroguanosine-3'-phosphate
  modified_base 11: mod_base = OTHER; note = 2'-fluorocytidine-3'-phosphate
  modified_base 12: mod_base = OTHER; note = 2'-O-methylguanosine-3'-phosphate
  modified_base 13: mod_base = OTHER; note = 2'-O-methyluridine-3'-phosphate
  modified_base 14: mod_base = OTHER; note = 2'-O-methylguanosine-3'-phosphate
  modified_base 15: mod_base = OTHER; note = 2'-O-methylguanosine-3'-phosphate
  modified_base 16: mod_base = OTHER; note = 2'-O-methyluridine-3'-phosphate
  modified_base 17: mod_base = OTHER; note = 2'-O-methyladenosine-3'-phosphate
  modified_base 18: mod_base = OTHER; note = 2'-O-methyluridine-3'-phosphate
  modified_base 19: mod_base = OTHER; note = 2'-O-methylguanosine-3'-phosphate
  modified_base 20: mod_base = OTHER; note = 2'-O-methyladenosine-3'-phosphate
  modified_base 21: mod_base = OTHER; note 2'-O-methyluridine-3'-phosphate-N-[tris(GalNAc-alkyl)-amido decanoyl)]-4-hydroxyprolinol (Hyp-(GalNAc-alkyl)3)
agtggtgaggcgtggtatgat

SEQ ID NO: 4960 - RNA, 21 nt, synthetic construct
  source 1..21: mol_type = other RNA
  modified_base 1: mod_base = OTHER; note = 2'-O-methyladenosine-3'- phosphorothioate
  modified_base 2: mod_base = OTHER; note = 2'-O-methyladenosine-3'- phosphorothioate
  modified_base 3: mod_base = OTHER; note = 2'-O-methylcytidine-3'-phosphate
  modified_base 4: mod_base = OTHER; note = 2'-O-methylcytidine-3'-phosphate
  modified_base 5: mod_base = OTHER; note = 2'-O-methyluridine-3'-phosphate
  modified_base 6: mod_base = OTHER; note = 2'-O-methylcytidine-3'-phosphate
  modified_base 7: mod_base = OTHER; note = 2'-fluoroguanosine-3'-phosphate
  modified_base 8: mod_base = OTHER; note = 2'-O-methylguanosine-3'-phosphate
  modified_base 9: mod_base = OTHER; note = 2'-fluorouridine-3'-phosphate
  modified_base 10: mod_base = OTHER; note = 2'-fluoroguanosine-3'-phosphate
  modified_base 11: mod_base = OTHER; note = 2'-fluorocytidine-3'-phosphate
  modified_base 12: mod_base = OTHER; note = 2'-O-methyluridine-3'-phosphate
  modified_base 13: mod_base = OTHER; note = 2'-O-methyladenosine-3'-phosphate
  modified_base 14: mod_base = OTHER; note = 2'-O-methyluridine-3'-phosphate
  modified_base 15: mod_base = OTHER; note = 2'-O-methylguanosine-3'-phosphate
  modified_base 16: mod_base = OTHER; note = 2'-O-methylcytidine-3'-phosphate
  modified_base 17: mod_base = OTHER; note = 2'-O-methyluridine-3'-phosphate
  modified_base 18: mod_base = OTHER; note = 2'-O-methylguanosine-3'-phosphate
  modified_base 19: mod_base = OTHER; note = 2'-O-methylcytidine-3'-phosphate
  modified_base 20: mod_base = OTHER; note = 2'-O-methylguanosine-3'-phosphate
  modified_base 21: mod_base = OTHER; note 2'-O-methyluridine-3'-phosphate-N-[tris(GalNAc-alkyl)-amido decanoyl)]-4-hydroxyprolinol (Hyp-(GalNAc-alkyl)3)
aacctcggtgctatgctgcgt

SEQ ID NO: 4961 - RNA, 21 nt, synthetic construct
  source 1..21: mol_type = other RNA
  modified_base 1: mod_base = OTHER; note = 2'-O-methylcytidine-3'- phosphorothioate
  modified_base 2: mod_base = OTHER; note = 2'-O-methylguanosine-3'- phosphorothioate
  modified_base 3: mod_base = OTHER; note = 2'-O-methylguanosine-3'-phosphate
  modified_base 4: mod_base = OTHER; note = 2'-O-methyluridine-3'-phosphate
  modified_base 5: mod_base = OTHER; note = 2'-O-methylguanosine-3'-phosphate
  modified_base 6: mod_base = OTHER; note = 2'-O-methylcytidine-3'-phosphate
  modified_base 7: mod_base = OTHER; note = 2'-fluorouridine-3'-phosphate
  modified_base 8: mod_base = OTHER; note = 2'-O-methyladenosine-3'-phosphate
  modified_base 9: mod_base = OTHER; note = 2'-fluorouridine-3'-phosphate
  modified_base 10: mod_base = OTHER; note = 2'-fluoroguanosine-3'-phosphate
  modified_base 11: mod_base = OTHER; note = 2'-fluorocytidine-3'-phosphate
  modified_base 12: mod_base = OTHER; note = 2'-O-methyluridine-3'-phosphate
  modified_base 13: mod_base = OTHER; note = 2'-O-methylguanosine-3'-phosphate
  modified_base 14: mod_base = OTHER; note = 2'-O-methylcytidine-3'-phosphate
  modified_base 15: mod_base = OTHER; note = 2'-O-methylguanosine-3'-phosphate
  modified_base 16: mod_base = OTHER; note = 2'-O-methylguanosine-3'-phosphate
  modified_base 17: mod_base = OTHER; note = 2'-O-methyluridine-3'-phosphate
  modified_base 18: mod_base = OTHER; note = 2'-O-methylguanosine-3'-phosphate
  modified_base 19: mod_base = OTHER; note = 2'-O-methyluridine-3'-phosphate
  modified_base 20: mod_base = OTHER; note = 2'-O-methylguanosine-3'-phosphate
  modified_base 21: mod_base = OTHER; note 2'-O-methyluridine-3'-phosphate-N-[tris(GalNAc-alkyl)-amido decanoyl)]-4-hydroxyprolinol (Hyp-(GalNAc-alkyl)3)
cggtgctatgctgcggtgtgt

SEQ ID NO: 4962 - RNA, 21 nt, synthetic construct
  source 1..21: mol_type = other RNA
  modified_base 1: mod_base = OTHER; note = 2'-O-methylcytidine-3'- phosphorothioate
  modified_base 2: mod_base = OTHER; note = 2'-O-methyluridine-3'-phosphorothioate
  modified_base 3: mod_base = OTHER; note = 2'-O-methyladenosine-3'-phosphate
  modified_base 4: mod_base = OTHER; note = 2'-O-methyluridine-3'-phosphate
  modified_base 5: mod_base = OTHER; note = 2'-O-methylguanosine-3'-phosphate
  modified_base 6: mod_base = OTHER; note = 2'-O-methylcytidine-3'-phosphate
  modified_base 7: mod_base = OTHER; note = 2'-fluorouridine-3'-phosphate
  modified_base 8: mod_base = OTHER; note = 2'-O-methylguanosine-3'-phosphate
  modified_base 9: mod_base = OTHER; note = 2'-fluorocytidine-3'-phosphate
  modified_base 10: mod_base = OTHER; note = 2'-fluoroguanosine-3'-phosphate
  modified_base 11: mod_base = OTHER; note = 2'-fluoroguanosine-3'-phosphate
  modified_base 12: mod_base = OTHER; note = 2'-O-methyluridine-3'-phosphate
  modified_base 13: mod_base = OTHER; note = 2'-O-methylguanosine-3'-phosphate
  modified_base 14: mod_base = OTHER; note = 2'-O-methyluridine-3'-phosphate
  modified_base 15: mod_base = OTHER; note = 2'-O-methylguanosine-3'-phosphate
  modified_base 16: mod_base = OTHER; note = 2'-O-methyluridine-3'-phosphate
  modified_base 17: mod_base = OTHER; note = 2'-O-methylguanosine-3'-phosphate
  modified_base 18: mod_base = OTHER; note = 2'-O-methylguanosine-3'-phosphate
  modified_base 19: mod_base = OTHER; note = 2'-O-methyladenosine-3'-phosphate
  modified_base 20: mod_base = OTHER; note = 2'-O-methylcytidine-3'-phosphate
  modified_base 21: mod_base = OTHER; note 2'-O-methyluridine-3'-phosphate-N-[tris(GalNAc-alkyl)-amido decanoyl)]-4-hydroxyprolinol (Hyp-(GalNAc-alkyl)3)
ctatgctgcggtgtgtggact

SEQ ID NO: 4963 - RNA, 21 nt, synthetic construct
  source 1..21: mol_type = other RNA
  modified_base 1: mod_base = OTHER; note = 2'-O-methylcytidine-3'- phosphorothioate
  modified_base 2: mod_base = OTHER; note = 2'-O-methylguanosine-3'- phosphorothioate
  modified_base 3: mod_base = OTHER; note = 2'-O-methylguanosine-3'-phosphate
  modified_base 4: mod_base = OTHER; note = 2'-O-methyluridine-3'-phosphate
  modified_base 5: mod_base = OTHER; note = 2'-O-methylguanosine-3'-phosphate
  modified_base 6: mod_base = OTHER; note = 2'-O-methyluridine-3'-phosphate
  modified_base 7: mod_base = OTHER; note = 2'-fluoroguanosine-3'-phosphate
  modified_base 8: mod_base = OTHER; note = 2'-O-methyluridine-3'-phosphate
  modified_base 9: mod_base = OTHER; note = 2'-fluoroguanosine-3'-phosphate
  modified_base 10: mod_base = OTHER; note = 2'-fluoroguanosine-3'-phosphate
  modified_base 11: mod_base = OTHER; note = 2'-fluoroadenosine-3'-phosphate
  modified_base 12: mod_base = OTHER; note = 2'-O-methylcytidine-3'-phosphate
  modified_base 13: mod_base = OTHER; note = 2'-O-methylcytidine-3'-phosphate
  modified_base 14: mod_base = OTHER; note = 2'-O-methyluridine-3'-phosphate
  modified_base 15: mod_base = OTHER; note = 2'-O-methylguanosine-3'-phosphate
  modified_base 16: mod_base = OTHER; note = 2'-O-methyluridine-3'-phosphate
  modified_base 17: mod_base = OTHER; note = 2'-O-methylcytidine-3'-phosphate
  modified_base 18: mod_base = OTHER; note = 2'-O-methyladenosine-3'-phosphate
  modified_base 19: mod_base = OTHER; note = 2'-O-methylcytidine-3'-phosphate
  modified_base 20: mod_base = OTHER; note = 2'-O-methylguanosine-3'-phosphate
  modified_base 21: mod_base = OTHER; note 2'-O-methyluridine-3'-phosphate-N-[tris(GalNAc-alkyl)-amido decanoyl)]-4-hydroxyprolinol (Hyp-(GalNAc-alkyl)3)
cggtgtgtggacctgtcacgt

SEQ ID NO: 4964 - RNA, 21 nt, synthetic construct
  source 1..21: mol_type = other RNA
  modified_base 1: mod_base = OTHER; note = 2'-O-methylguanosine-3'- phosphorothioate
  modified_base 2: mod_base = OTHER; note = 2'-O-methylguanosine-3'- phosphorothioate
  modified_base 3: mod_base = OTHER; note = 2'-O-methylcytidine-3'-phosphate
  modified_base 4: mod_base = OTHER; note = 2'-O-methylcytidine-3'-phosphate
  modified_base 5: mod_base = OTHER; note = 2'-O-methyladenosine-3'-phosphate
  modified_base 6: mod_base = OTHER; note = 2'-O-methylguanosine-3'-phosphate
  modified_base 7: mod_base = OTHER; note = 2'-fluorocytidine-3'-phosphate
  modified_base 8: mod_base = OTHER; note = 2'-O-methylcytidine-3'-phosphate
  modified_base 9: mod_base = OTHER; note = 2'-fluorouridine-3'-phosphate
  modified_base 10: mod_base = OTHER; note = 2'-fluorocytidine-3'-phosphate
  modified_base 11: mod_base = OTHER; note = 2'-fluoroadenosine-3'-phosphate
  modified_base 12: mod_base = OTHER; note = 2'-O-methyluridine-3'-phosphate
  modified_base 13: mod_base = OTHER; note = 2'-O-methylguanosine-3'-phosphate
  modified_base 14: mod_base = OTHER; note = 2'-O-methylcytidine-3'-phosphate
  modified_base 15: mod_base = OTHER; note = 2'-O-methyladenosine-3'-phosphate
  modified_base 16: mod_base = OTHER; note = 2'-O-methylguanosine-3'-phosphate
  modified_base 17: mod_base = OTHER; note = 2'-O-methylcytidine-3'-phosphate
  modified_base 18: mod_base = OTHER; note = 2'-O-methyluridine-3'-phosphate
  modified_base 19: mod_base = OTHER; note = 2'-O-methylguanosine-3'-phosphate
  modified_base 20: mod_base = OTHER; note = 2'-O-methyladenosine-3'-phosphate
  modified_base 21: mod_base = OTHER; note 2'-O-methyluridine-3'-phosphate-N-[tris(GalNAc-alkyl)-amido decanoyl)]-4-hydroxyprolinol (Hyp-(GalNAc-alkyl)3)
ggccagcctcatgcagctgat

SEQ ID NO: 4965 - RNA, 21 nt, synthetic construct
  source 1..21: mol_type = other RNA
  modified_base 1: mod_base = OTHER; note = 2'-O-methylguanosine-3'- phosphorothioate
  modified_base 2: mod_base = OTHER; note = 2'-O-methylcytidine-3'- phosphorothioate
  modified_base 3: mod_base = OTHER; note = 2'-O-methylcytidine-3'-phosphate
  modified_base 4: mod_base = OTHER; note = 2'-O-methyluridine-3'-phosphate
  modified_base 5: mod_base = OTHER; note = 2'-O-methylcytidine-3'-phosphate
  modified_base 6: mod_base = OTHER; note = 2'-O-methyladenosine-3'-phosphate
  modified_base 7: mod_base = OTHER; note = 2'-fluorouridine-3'-phosphate
  modified_base 8: mod_base = OTHER; note = 2'-O-methylguanosine-3'-phosphate
  modified_base 9: mod_base = OTHER; note = 2'-fluorocytidine-3'-phosphate
  modified_base 10: mod_base = OTHER; note = 2'-fluoroadenosine-3'-phosphate
  modified_base 11: mod_base = OTHER; note = 2'-fluoroguanosine-3'-phosphate
  modified_base 12: mod_base = OTHER; note = 2'-O-methylcytidine-3'-phosphate
  modified_base 13: mod_base = OTHER; note = 2'-O-methyluridine-3'-phosphate
  modified_base 14: mod_base = OTHER; note = 2'-O-methylguanosine-3'-phosphate
  modified_base 15: mod_base = OTHER; note = 2'-O-methyladenosine-3'-phosphate
  modified_base 16: mod_base = OTHER; note = 2'-O-methyladenosine-3'-phosphate
  modified_base 17: mod_base = OTHER; note = 2'-O-methylguanosine-3'-phosphate
  modified_base 18: mod_base = OTHER; note = 2'-O-methylguanosine-3'-phosphate
  modified_base 19: mod_base = OTHER; note = 2'-O-methyluridine-3'-phosphate
  modified_base 20: mod_base = OTHER; note = 2'-O-methylguanosine-3'-phosphate
  modified_base 21: mod_base = OTHER; note 2'-O-methyluridine-3'-phosphate-N-[tris(GalNAc-alkyl)-amido decanoyl)]-4-hydroxyprolinol (Hyp-(GalNAc-alkyl)3)
gcctcatgcagctgaaggtgt

SEQ ID NO: 4966 - RNA, 21 nt, synthetic construct
  source 1..21: mol_type = other RNA
  modified_base 1: mod_base = OTHER; note = 2'-O-methyladenosine-3'- phosphorothioate
  modified_base 2: mod_base = OTHER; note = 2'-O-methyluridine-3'-phosphorothioate
  modified_base 3: mod_base = OTHER; note = 2'-O-methylguanosine-3'-phosphate
  modified_base 4: mod_base = OTHER; note = 2'-O-methylcytidine-3'-phosphate
  modified_base 5: mod_base = OTHER; note = 2'-O-methyladenosine-3'-phosphate
  modified_base 6: mod_base = OTHER; note = 2'-O-methylguanosine-3'-phosphate
  modified_base 7: mod_base = OTHER; note = 2'-fluorocytidine-3'-phosphate
  modified_base 8: mod_base = OTHER; note = 2'-O-methyluridine-3'-phosphate
  modified_base 9: mod_base = OTHER; note = 2'-fluoroguanosine-3'-phosphate
  modified_base 10: mod_base = OTHER; note = 2'-fluoroadenosine-3'-phosphate
  modified_base 11: mod_base = OTHER; note = 2'-fluoroadenosine-3'-phosphate
  modified_base 12: mod_base = OTHER; note = 2'-O-methylguanosine-3'-phosphate
  modified_base 13: mod_base = OTHER; note = 2'-O-methylguanosine-3'-phosphate
  modified_base 14: mod_base = OTHER; note = 2'-O-methyluridine-3'-phosphate
  modified_base 15: mod_base = OTHER; note = 2'-O-methylguanosine-3'-phosphate
  modified_base 16: mod_base = OTHER; note = 2'-O-methyladenosine-3'-phosphate
  modified_base 17: mod_base = OTHER; note = 2'-O-methylcytidine-3'-phosphate
  modified_base 18: mod_base = OTHER; note = 2'-O-methylguanosine-3'-phosphate
  modified_base 19: mod_base = OTHER; note = 2'-O-methylguanosine-3'-phosphate
  modified_base 20: mod_base = OTHER; note = 2'-O-methylcytidine-3'-phosphate
  modified_base 21: mod_base = OTHER; note 2'-O-methyluridine-3'-phosphate-N-[tris(GalNAc-alkyl)-amido decanoyl)]-4-hydroxyprolinol (Hyp-(GalNAc-alkyl)3)
atgcagctgaaggtgacggct

SEQ ID NO: 4967 - RNA, 21 nt, synthetic construct
  source 1..21: mol_type = other RNA
  modified_base 1: mod_base = OTHER; note = 2'-O-methylguanosine-3'- phosphorothioate
  modified_base 2: mod_base = OTHER; note = 2'-O-methylcytidine-3'- phosphorothioate
  modified_base 3: mod_base = OTHER; note = 2'-O-methyluridine-3'-phosphate
  modified_base 4: mod_base = OTHER; note = 2'-O-methylguanosine-3'-phosphate
  modified_base 5: mod_base = OTHER; note = 2'-O-methyladenosine-3'-phosphate
  modified_base 6: mod_base = OTHER; note = 2'-O-methyladenosine-3'-phosphate
  modified_base 7: mod_base = OTHER; note = 2'-fluoroguanosine-3'-phosphate
  modified_base 8: mod_base = OTHER; note = 2'-O-methylguanosine-3'-phosphate
  modified_base 9: mod_base = OTHER; note = 2'-fluorouridine-3'-phosphate
  modified_base 10: mod_base = OTHER; note = 2'-fluoroguanosine-3'-phosphate
  modified_base 11: mod_base = OTHER; note = 2'-fluoroadenosine-3'-phosphate
  modified_base 12: mod_base = OTHER; note = 2'-O-methylcytidine-3'-phosphate
  modified_base 13: mod_base = OTHER; note = 2'-O-methylguanosine-3'-phosphate
  modified_base 14: mod_base = OTHER; note = 2'-O-methylguanosine-3'-phosphate
  modified_base 15: mod_base = OTHER; note = 2'-O-methylcytidine-3'-phosphate
  modified_base 16: mod_base = OTHER; note = 2'-O-methylguanosine-3'-phosphate
  modified_base 17: mod_base = OTHER; note = 2'-O-methylcytidine-3'-phosphate
  modified_base 18: mod_base = OTHER; note = 2'-O-methyluridine-3'-phosphate
  modified_base 19: mod_base = OTHER; note = 2'-O-methylguanosine-3'-phosphate
  modified_base 20: mod_base = OTHER; note = 2'-O-methyladenosine-3'-phosphate
  modified_base 21: mod_base = OTHER; note 2'-O-methyluridine-3'-phosphate-N-[tris(GalNAc-alkyl)-amido decanoyl)]-4-hydroxyprolinol (Hyp-(GalNAc-alkyl)3)
gctgaaggtgacggcgctgat

SEQ ID NO: 4968 - RNA, 21 nt, synthetic construct
  source 1..21: mol_type = other RNA
  modified_base 1: mod_base = OTHER; note = 2'-O-methylguanosine-3'- phosphorothioate
  modified_base 2: mod_base = OTHER; note = 2'-O-methylguanosine-3'- phosphorothioate
  modified_base 3: mod_base = OTHER; note = 2'-O-methyluridine-3'-phosphate
  modified_base 4: mod_base = OTHER; note = 2'-O-methylguanosine-3'-phosphate
  modified_base 5: mod_base = OTHER; note = 2'-O-methyladenosine-3'-phosphate
  modified_base 6: mod_base = OTHER; note = 2'-O-methylcytidine-3'-phosphate
  modified_base 7: mod_base = OTHER; note = 2'-fluoroguanosine-3'-phosphate
  modified_base 8: mod_base = OTHER; note = 2'-O-methylguanosine-3'-phosphate
  modified_base 9: mod_base = OTHER; note = 2'-fluorocytidine-3'-phosphate
  modified_base 10: mod_base = OTHER; note = 2'-fluoroguanosine-3'-phosphate
  modified_base 11: mod_base = OTHER; note = 2'-fluorocytidine-3'-phosphate
  modified_base 12: mod_base = OTHER; note = 2'-O-methyluridine-3'-phosphate
  modified_base 13: mod_base = OTHER; note = 2'-O-methylguanosine-3'-phosphate
  modified_base 14: mod_base = OTHER; note = 2'-O-methyladenosine-3'-phosphate
  modified_base 15: mod_base = OTHER; note = 2'-O-methylcytidine-3'-phosphate
  modified_base 16: mod_base = OTHER; note = 2'-O-methylcytidine-3'-phosphate
  modified_base 17: mod_base = OTHER; note = 2'-O-methyladenosine-3'-phosphate
  modified_base 18: mod_base = OTHER; note = 2'-O-methylguanosine-3'-phosphate
  modified_base 19: mod_base = OTHER; note = 2'-O-methyluridine-3'-phosphate
  modified_base 20: mod_base = OTHER; note = 2'-O-methyladenosine-3'-phosphate
  modified_base 21: mod_base = OTHER; note 2'-O-methyluridine-3'-phosphate-N-[tris(GalNAc-alkyl)-amido decanoyl)]-4-hydroxyprolinol (Hyp-(GalNAc-alkyl)3)
ggtgacggcgctgaccagtat

SEQ ID NO: 4969 - RNA, 21 nt, synthetic construct
  source 1..21: mol_type = other RNA
  modified_base 1: mod_base = OTHER; note = 2'-O-methylguanosine-3'- phosphorothioate
  modified_base 2: mod_base = OTHER; note = 2'-O-methylcytidine-3'- phosphorothioate
  modified_base 3: mod_base = OTHER; note = 2'-O-methyluridine-3'-phosphate
  modified_base 4: mod_base = OTHER; note = 2'-O-methylguanosine-3'-phosphate
  modified_base 5: mod_base = OTHER; note = 2'-O-methyladenosine-3'-phosphate
  modified_base 6: mod_base = OTHER; note = 2'-O-methylcytidine-3'-phosphate
  modified_base 7: mod_base = OTHER; note = 2'-fluorocytidine-3'-phosphate
  modified_base 8: mod_base = OTHER; note = 2'-O-methyladenosine-3'-phosphate
  modified_base 9: mod_base = OTHER; note = 2'-fluoroguanosine-3'-phosphate
  modified_base 10: mod_base = OTHER; note = 2'-fluorouridine-3'-phosphate
  modified_base 11: mod_base = OTHER; note = 2'-fluoroadenosine-3'-phosphate
  modified_base 12: mod_base = OTHER; note = 2'-O-methylcytidine-3'-phosphate
  modified_base 13: mod_base = OTHER; note = 2'-O-methyluridine-3'-phosphate
  modified_base 14: mod_base = OTHER; note = 2'-O-methylcytidine-3'-phosphate
  modified_base 15: mod_base = OTHER; note = 2'-O-methylguanosine-3'-phosphate
  modified_base 16: mod_base = OTHER; note = 2'-O-methylguanosine-3'-phosphate
  modified_base 17: mod_base = OTHER; note = 2'-O-methylcytidine-3'-phosphate
  modified_base 18: mod_base = OTHER; note = 2'-O-methyluridine-3'-phosphate
  modified_base 19: mod_base = OTHER; note = 2'-O-methylcytidine-3'-phosphate
  modified_base 20: mod_base = OTHER; note = 2'-O-methyluridine-3'-phosphate
  modified_base 21: mod_base = OTHER; note 2'-O-methyluridine-3'-phosphate-N-[tris(GalNAc-alkyl)-amido decanoyl)]-4-hydroxyprolinol (Hyp-(GalNAc-alkyl)3)
gctgaccagtactcggctctt

SEQ ID NO: 4970 - RNA, 21 nt, synthetic construct
  source 1..21: mol_type = other RNA
  modified_base 1: mod_base = OTHER; note = 2'-O-methyladenosine-3'- phosphorothioate
  modified_base 2: mod_base = OTHER; note = 2'-O-methylguanosine-3'- phosphorothioate
  modified_base 3: mod_base = OTHER; note = 2'-O-methyluridine-3'-phosphate
  modified_base 4: mod_base = OTHER; note = 2'-O-methyladenosine-3'-phosphate
  modified_base 5: mod_base = OTHER; note = 2'-O-methylcytidine-3'-phosphate
  modified_base 6: mod_base = OTHER; note = 2'-O-methyluridine-3'-phosphate
  modified_base 7: mod_base = OTHER; note = 2'-fluorocytidine-3'-phosphate
  modified_base 8: mod_base = OTHER; note = 2'-O-methylguanosine-3'-phosphate
  modified_base 9: mod_base = OTHER; note = 2'-fluoroguanosine-3'-phosphate
  modified_base 10: mod_base = OTHER; note = 2'-fluorocytidine-3'-phosphate
  modified_base 11: mod_base = OTHER; note = 2'-fluorouridine-3'-phosphate
  modified_base 12: mod_base = OTHER; note = 2'-O-methylcytidine-3'-phosphate
  modified_base 13: mod_base = OTHER; note = 2'-O-methyluridine-3'-phosphate
  modified_base 14: mod_base = OTHER; note = 2'-O-methylguanosine-3'-phosphate
  modified_base 15: mod_base = OTHER; note = 2'-O-methyluridine-3'-phosphate
  modified_base 16: mod_base = OTHER; note = 2'-O-methyladenosine-3'-phosphate
  modified_base 17: mod_base = OTHER; note = 2'-O-methyladenosine-3'-phosphate
  modified_base 18: mod_base = OTHER; note = 2'-O-methylguanosine-3'-phosphate
  modified_base 19: mod_base = OTHER; note = 2'-O-methylguanosine-3'-phosphate
  modified_base 20: mod_base = OTHER; note = 2'-O-methyladenosine-3'-phosphate
  modified_base 21: mod_base = OTHER; note 2'-O-methyluridine-3'-phosphate-N-[tris(GalNAc-alkyl)-amido decanoyl)]-4-hydroxyprolinol (Hyp-(GalNAc-alkyl)3)
agtactcggctctgtaaggat

SEQ ID NO: 4971 - RNA, 21 nt, synthetic construct
  source 1..21: mol_type = other RNA
  modified_base 1: mod_base = OTHER; note = 2'-O-methyluridine-3'-phosphorothioate
  modified_base 2: mod_base = OTHER; note = 2'-O-methylcytidine-3'- phosphorothioate
  modified_base 3: mod_base = OTHER; note = 2'-O-methylguanosine-3'-phosphate
  modified_base 4: mod_base = OTHER; note = 2'-O-methylguanosine-3'-phosphate
  modified_base 5: mod_base = OTHER; note = 2'-O-methylcytidine-3'-phosphate
  modified_base 6: mod_base = OTHER; note = 2'-O-methyluridine-3'-phosphate
  modified_base 7: mod_base = OTHER; note = 2'-fluorocytidine-3'-phosphate
  modified_base 8: mod_base = OTHER; note = 2'-O-methyluridine-3'-phosphate
  modified_base 9: mod_base = OTHER; note = 2'-fluoroguanosine-3'-phosphate
  modified_base 10: mod_base = OTHER; note = 2'-fluorouridine-3'-phosphate
  modified_base 11: mod_base = OTHER; note = 2'-fluoroadenosine-3'-phosphate
  modified_base 12: mod_base = OTHER; note = 2'-O-methyladenosine-3'-phosphate
  modified_base 13: mod_base = OTHER; note = 2'-O-methylguanosine-3'-phosphate
  modified_base 14: mod_base = OTHER; note = 2'-O-methylguanosine-3'-phosphate
  modified_base 15: mod_base = OTHER; note = 2'-O-methyladenosine-3'-phosphate
  modified_base 16: mod_base = OTHER; note = 2'-O-methylguanosine-3'-phosphate
  modified_base 17: mod_base = OTHER; note = 2'-O-methylcytidine-3'-phosphate
  modified_base 18: mod_base = OTHER; note = 2'-O-methyluridine-3'-phosphate
  modified_base 19: mod_base = OTHER; note = 2'-O-methyladenosine-3'-phosphate
  modified_base 20: mod_base = OTHER; note = 2'-O-methylguanosine-3'-phosphate
  modified_base 21: mod_base = OTHER; note 2'-O-methyluridine-3'-phosphate-N-[tris(GalNAc-alkyl)-amido decanoyl)]-4-hydroxyprolinol (Hyp-(GalNAc-alkyl)3)
tcggctctgtaaggagctagt

SEQ ID NO: 4972 - RNA, 21 nt, synthetic construct
  source 1..21: mol_type = other RNA
  modified_base 1: mod_base = OTHER; note = 2'-O-methylcytidine-3'- phosphorothioate
  modified_base 2: mod_base = OTHER; note = 2'-O-methyluridine-3'-phosphorothioate
  modified_base 3: mod_base = OTHER; note = 2'-O-methylguanosine-3'-phosphate
  modified_base 4: mod_base = OTHER; note = 2'-O-methyluridine-3'-phosphate
  modified_base 5: mod_base = OTHER; note = 2'-O-methyladenosine-3'-phosphate
  modified_base 6: mod_base = OTHER; note = 2'-O-methyladenosine-3'-phosphate
  modified_base 7: mod_base = OTHER; note = 2'-fluoroguanosine-3'-phosphate
  modified_base 8: mod_base = OTHER; note = 2'-O-methylguanosine-3'-phosphate
  modified_base 9: mod_base = OTHER; note = 2'-fluoroadenosine-3'-phosphate
  modified_base 10: mod_base = OTHER; note = 2'-fluoroguanosine-3'-phosphate
  modified_base 11: mod_base = OTHER; note = 2'-fluorocytidine-3'-phosphate
  modified_base 12: mod_base = OTHER; note = 2'-O-methyluridine-3'-phosphate
  modified_base 13: mod_base = OTHER; note = 2'-O-methyladenosine-3'-phosphate
  modified_base 14: mod_base = OTHER; note = 2'-O-methylguanosine-3'-phosphate
  modified_base 15: mod_base = OTHER; note = 2'-O-methylcytidine-3'-phosphate
  modified_base 16: mod_base = OTHER; note = 2'-O-methylcytidine-3'-phosphate
  modified_base 17: mod_base = OTHER; note = 2'-O-methyluridine-3'-phosphate
  modified_base 18: mod_base = OTHER; note = 2'-O-methylcytidine-3'-phosphate
  modified_base 19: mod_base = OTHER; note = 2'-O-methylguanosine-3'-phosphate
  modified_base 20: mod_base = OTHER; note = 2'-O-methyluridine-3'-phosphate
  modified_base 21: mod_base = OTHER; note 2'-O-methyluridine-3'-phosphate-N-[tris(GalNAc-alkyl)-amido decanoyl)]-4-hydroxyprolinol (Hyp-(GalNAc-alkyl)3)
ctgtaaggagctagcctcgtt

SEQ ID NO: 4973 - RNA, 21 nt, synthetic construct
  source 1..21: mol_type = other RNA
  modified_base 1: mod_base = OTHER; note = 2'-O-methyladenosine-3'- phosphorothioate
  modified_base 2: mod_base = OTHER; note = 2'-O-methylguanosine-3'- phosphorothioate
  modified_base 3: mod_base = OTHER; note = 2'-O-methylguanosine-3'-phosphate
  modified_base 4: mod_base = OTHER; note = 2'-O-methyladenosine-3'-phosphate
  modified_base 5: mod_base = OTHER; note = 2'-O-methylguanosine-3'-phosphate
  modified_base 6: mod_base = OTHER; note = 2'-O-methylcytidine-3'-phosphate
  modified_base 7: mod_base = OTHER; note = 2'-fluorouridine-3'-phosphate
  modified_base 8: mod_base = OTHER; note = 2'-O-methyladenosine-3'-phosphate
  modified_base 9: mod_base = OTHER; note = 2'-fluoroguanosine-3'-phosphate
  modified_base 10: mod_base = OTHER; note = 2'-fluorocytidine-3'-phosphate
  modified_base 11: mod_base = OTHER; note = 2'-fluorocytidine-3'-phosphate
  modified_base 12: mod_base = OTHER; note = 2'-O-methyluridine-3'-phosphate
  modified_base 13: mod_base = OTHER; note = 2'-O-methylcytidine-3'-phosphate
  modified_base 14: mod_base = OTHER; note = 2'-O-methylguanosine-3'-phosphate
  modified_base 15: mod_base = OTHER; note = 2'-O-methyluridine-3'-phosphate
  modified_base 16: mod_base = OTHER; note = 2'-O-methylguanosine-3'-phosphate
  modified_base 17: mod_base = OTHER; note = 2'-O-methylguanosine-3'-phosphate
  modified_base 18: mod_base = OTHER; note = 2'-O-methylguanosine-3'-phosphate
  modified_base 19: mod_base = OTHER; note = 2'-O-methyluridine-3'-phosphate
  modified_base 20: mod_base = OTHER; note = 2'-O-methylcytidine-3'-phosphate
  modified_base 21: mod_base = OTHER; note 2'-O-methyluridine-3'-phosphate-N-[tris(GalNAc-alkyl)-amido decanoyl)]-4-hydroxyprolinol (Hyp-(GalNAc-alkyl)3)
aggagctagcctcgtgggtct

SEQ ID NO: 4974 - RNA, 21 nt, synthetic construct
  source 1..21: mol_type = other RNA
  modified_base 1: mod_base = OTHER; note = 2'-O-methyladenosine-3'- phosphorothioate
  modified_base 2: mod_base = OTHER; note = 2'-O-methylguanosine-3'- phosphorothioate
  modified_base 3: mod_base = OTHER; note = 2'-O-methylcytidine-3'-phosphate
  modified_base 4: mod_base = OTHER; note = 2'-O-methylcytidine-3'-phosphate
  modified_base 5: mod_base = OTHER; note = 2'-O-methyluridine-3'-phosphate
  modified_base 6: mod_base = OTHER; note = 2'-O-methylcytidine-3'-phosphate
  modified_base 7: mod_base = OTHER; note = 2'-fluoroguanosine-3'-phosphate
  modified_base 8: mod_base = OTHER; note = 2'-O-methyluridine-3'-phosphate
  modified_base 9: mod_base = OTHER; note = 2'-fluoroguanosine-3'-phosphate
  modified_base 10: mod_base = OTHER; note = 2'-fluoroguanosine-3'-phosphate
  modified_base 11: mod_base = OTHER; note = 2'-fluoroguanosine-3'-phosphate
  modified_base 12: mod_base = OTHER; note = 2'-O-methyluridine-3'-phosphate
  modified_base 13: mod_base = OTHER; note = 2'-O-methylcytidine-3'-phosphate
  modified_base 14: mod_base = OTHER; note = 2'-O-methyladenosine-3'-phosphate
  modified_base 15: mod_base = OTHER; note = 2'-O-methylguanosine-3'-phosphate
  modified_base 16: mod_base = OTHER; note = 2'-O-methyladenosine-3'-phosphate
  modified_base 17: mod_base = OTHER; note = 2'-O-methyladenosine-3'-phosphate
  modified_base 18: mod_base = OTHER; note = 2'-O-methylguanosine-3'-phosphate
  modified_base 19: mod_base = OTHER; note = 2'-O-methylguanosine-3'-phosphate
  modified_base 20: mod_base = OTHER; note = 2'-O-methylcytidine-3'-phosphate
  modified_base 21: mod_base = OTHER; note 2'-O-methyluridine-3'-phosphate-N-[tris(GalNAc-alkyl)-amido decanoyl)]-4-hydroxyprolinol (Hyp-(GalNAc-alkyl)3)
agcctcgtgggtcagaaggct

SEQ ID NO: 4975 - RNA, 21 nt, synthetic construct
  source 1..21: mol_type = other RNA
  modified_base 1: mod_base = OTHER; note = 2'-O-methylguanosine-3'- phosphorothioate
  modified_base 2: mod_base = OTHER; note = 2'-O-methyluridine-3'-phosphorothioate
  modified_base 3: mod_base = OTHER; note = 2'-O-methylguanosine-3'-phosphate
  modified_base 4: mod_base = OTHER; note = 2'-O-methylguanosine-3'-phosphate
  modified_base 5: mod_base = OTHER; note = 2'-O-methylguanosine-3'-phosphate
  modified_base 6: mod_base = OTHER; note = 2'-O-methyluridine-3'-phosphate
  modified_base 7: mod_base = OTHER; note = 2'-fluorocytidine-3'-phosphate
  modified_base 8: mod_base = OTHER; note = 2'-O-methyladenosine-3'-phosphate
  modified_base 9: mod_base = OTHER; note = 2'-fluoroguanosine-3'-phosphate
  modified_base 10: mod_base = OTHER; note = 2'-fluoroadenosine-3'-phosphate
  modified_base 11: mod_base = OTHER; note = 2'-fluoroadenosine-3'-phosphate
  modified_base 12: mod_base = OTHER; note = 2'-O-methylguanosine-3'-phosphate
  modified_base 13: mod_base = OTHER; note = 2'-O-methylguanosine-3'-phosphate
  modified_base 14: mod_base = OTHER; note = 2'-O-methylcytidine-3'-phosphate
  modified_base 15: mod_base = OTHER; note = 2'-O-methylcytidine-3'-phosphate
  modified_base 16: mod_base = OTHER; note = 2'-O-methyladenosine-3'-phosphate
  modified_base 17: mod_base = OTHER; note = 2'-O-methylguanosine-3'-phosphate
  modified_base 18: mod_base = OTHER; note = 2'-O-methylguanosine-3'-phosphate
  modified_base 19: mod_base = OTHER; note = 2'-O-methyladenosine-3'-phosphate
  modified_base 20: mod_base = OTHER; note = 2'-O-methylguanosine-3'-phosphate
  modified_base 21: mod_base = OTHER; note 2'-O-methyluridine-3'-phosphate-N-[tris(GalNAc-alkyl)-amido decanoyl)]-4-hydroxyprolinol (Hyp-(GalNAc-alkyl)3)
gtgggtcagaaggccaggagt

SEQ ID NO: 4976 - RNA, 21 nt, synthetic construct
  source 1..21: mol_type = other RNA
  modified_base 1: mod_base = OTHER; note = 2'-O-methylguanosine-3'- phosphorothioate
  modified_base 2: mod_base = OTHER; note = 2'-O-methylguanosine-3'- phosphorothioate
  modified_base 3: mod_base = OTHER; note = 2'-O-methylcytidine-3'-phosphate
  modified_base 4: mod_base = OTHER; note = 2'-O-methylcytidine-3'-phosphate
  modified_base 5: mod_base = OTHER; note = 2'-O-methyladenosine-3'-phosphate
  modified_base 6: mod_base = OTHER; note = 2'-O-methylguanosine-3'-phosphate
  modified_base 7: mod_base = OTHER; note = 2'-fluoroguanosine-3'-phosphate
  modified_base 8: mod_base = OTHER; note = 2'-O-methyladenosine-3'-phosphate
  modified_base 9: mod_base = OTHER; note = 2'-fluoroguanosine-3'-phosphate
  modified_base 10: mod_base = OTHER; note = 2'-fluorocytidine-3'-phosphate
  modified_base 11: mod_base = OTHER; note = 2'-fluorocytidine-3'-phosphate
  modified_base 12: mod_base = OTHER; note = 2'-O-methyluridine-3'-phosphate
  modified_base 13: mod_base = OTHER; note = 2'-O-methylcytidine-3'-phosphate
  modified_base 14: mod_base = OTHER; note = 2'-O-methylcytidine-3'-phosphate
  modified_base 15: mod_base = OTHER; note = 2'-O-methyluridine-3'-phosphate
  modified_base 16: mod_base = OTHER; note = 2'-O-methyluridine-3'-phosphate
  modified_base 17: mod_base = OTHER; note = 2'-O-methylguanosine-3'-phosphate
  modified_base 18: mod_base = OTHER; note = 2'-O-methylguanosine-3'-phosphate
  modified_base 19: mod_base = OTHER; note = 2'-O-methyladenosine-3'-phosphate
  modified_base 20: mod_base = OTHER; note = 2'-O-methylguanosine-3'-phosphate
  modified_base 21: mod_base = OTHER; note 2'-O-methyluridine-3'-phosphate-N-[tris(GalNAc-alkyl)-amido decanoyl)]-4-hydroxyprolinol (Hyp-(GalNAc-alkyl)3)
ggccaggagcctccttggagt

SEQ ID NO: 4977 - RNA, 21 nt, synthetic construct
  source 1..21: mol_type = other RNA
  modified_base 1: mod_base = OTHER; note = 2'-O-methylguanosine-3'- phosphorothioate
  modified_base 2: mod_base = OTHER; note = 2'-O-methylguanosine-3'- phosphorothioate
  modified_base 3: mod_base = OTHER; note = 2'-O-methyladenosine-3'-phosphate
  modified_base 4: mod_base = OTHER; note = 2'-O-methylguanosine-3'-phosphate
  modified_base 5: mod_base = OTHER; note = 2'-O-methylcytidine-3'-phosphate
  modified_base 6: mod_base = OTHER; note = 2'-O-methylcytidine-3'-phosphate
  modified_base 7: mod_base = OTHER; note = 2'-fluorouridine-3'-phosphate
  modified_base 8: mod_base = OTHER; note = 2'-O-methylcytidine-3'-phosphate
  modified_base 9: mod_base = OTHER; note = 2'-fluorocytidine-3'-phosphate
  modified_base 10: mod_base = OTHER; note = 2'-fluorouridine-3'-phosphate
  modified_base 11: mod_base = OTHER; note = 2'-fluorouridine-3'-phosphate
  modified_base 12: mod_base = OTHER; note = 2'-O-methylguanosine-3'-phosphate
  modified_base 13: mod_base = OTHER; note = 2'-O-methylguanosine-3'-phosphate
  modified_base 14: mod_base = OTHER; note = 2'-O-methyladenosine-3'-phosphate
  modified_base 15: mod_base = OTHER; note = 2'-O-methylguanosine-3'-phosphate
  modified_base 16: mod_base = OTHER; note = 2'-O-methylcytidine-3'-phosphate
  modified_base 17: mod_base = OTHER; note = 2'-O-methyluridine-3'-phosphate
  modified_base 18: mod_base = OTHER; note = 2'-O-methylguanosine-3'-phosphate
  modified_base 19: mod_base = OTHER; note = 2'-O-methyladenosine-3'-phosphate
  modified_base 20: mod_base = OTHER; note = 2'-O-methylguanosine-3'-phosphate
  modified_base 21: mod_base = OTHER; note 2'-O-methyluridine-3'-phosphate-N-[tris(GalNAc-alkyl)-amido decanoyl)]-4-hydroxyprolinol (Hyp-(GalNAc-alkyl)3)
ggagcctccttggagctgagt

SEQ ID NO: 4978 - RNA, 21 nt, synthetic construct
  source 1..21: mol_type = other RNA
  modified_base 1: mod_base = OTHER; note = 2'-O-methylguanosine-3'- phosphorothioate
  modified_base 2: mod_base = OTHER; note = 2'-O-methyladenosine-3'- phosphorothioate
  modified_base 3: mod_base = OTHER; note = 2'-O-methylguanosine-3'-phosphate
  modified_base 4: mod_base = OTHER; note = 2'-O-methyladenosine-3'-phosphate
  modified_base 5: mod_base = OTHER; note = 2'-O-methylguanosine-3'-phosphate
  modified_base 6: mod_base = OTHER; note = 2'-O-methylguanosine-3'-phosphate
  modified_base 7: mod_base = OTHER; note = 2'-fluorocytidine-3'-phosphate
  modified_base 8: mod_base = OTHER; note = 2'-O-methyluridine-3'-phosphate
  modified_base 9: mod_base = OTHER; note = 2'-fluoroguanosine-3'-phosphate
  modified_base 10: mod_base = OTHER; note = 2'-fluoroguanosine-3'-phosphate
  modified_base 11: mod_base = OTHER; note = 2'-fluorocytidine-3'-phosphate
  modified_base 12: mod_base = OTHER; note = 2'-O-methyluridine-3'-phosphate
  modified_base 13: mod_base = OTHER; note = 2'-O-methylguanosine-3'-phosphate
  modified_base 14: mod_base = OTHER; note = 2'-O-methyladenosine-3'-phosphate
  modified_base 15: mod_base = OTHER; note = 2'-O-methyladenosine-3'-phosphate
  modified_base 16: mod_base = OTHER; note = 2'-O-methylguanosine-3'-phosphate
  modified_base 17: mod_base = OTHER; note = 2'-O-methylcytidine-3'-phosphate
  modified_base 18: mod_base = OTHER; note = 2'-O-methyluridine-3'-phosphate
  modified_base 19: mod_base = OTHER; note = 2'-O-methyladenosine-3'-phosphate
  modified_base 20: mod_base = OTHER; note = 2'-O-methyluridine-3'-phosphate
  modified_base 21: mod_base = OTHER; note 2'-O-methyluridine-3'-phosphate-N-[tris(GalNAc-alkyl)-amido decanoyl)]-4-hydroxyprolinol (Hyp-(GalNAc-alkyl)3)
gagaggctggctgaagctatt

SEQ ID NO: 4979 - RNA, 21 nt, synthetic construct
  source 1..21: mol_type = other RNA
  modified_base 1: mod_base = OTHER; note = 2'-O-methylguanosine-3'- phosphorothioate
  modified_base 2: mod_base = OTHER; note = 2'-O-methylguanosine-3'- phosphorothioate
  modified_base 3: mod_base = OTHER; note = 2'-O-methylcytidine-3'-phosphate
  modified_base 4: mod_base = OTHER; note = 2'-O-methyluridine-3'-phosphate
  modified_base 5: mod_base = OTHER; note = 2'-O-methylguanosine-3'-phosphate
  modified_base 6: mod_base = OTHER; note = 2'-O-methyladenosine-3'-phosphate
  modified_base 7: mod_base = OTHER; note = 2'-fluoroadenosine-3'-phosphate
  modified_base 8: mod_base = OTHER; note = 2'-O-methylguanosine-3'-phosphate
  modified_base 9: mod_base = OTHER; note = 2'-fluorocytidine-3'-phosphate
  modified_base 10: mod_base = OTHER; note = 2'-fluorouridine-3'-phosphate
  modified_base 11: mod_base = OTHER; note = 2'-fluoroadenosine-3'-phosphate
  modified_base 12: mod_base = OTHER; note = 2'-O-methyluridine-3'-phosphate
  modified_base 13: mod_base = OTHER; note = 2'-O-methylguanosine-3'-phosphate
  modified_base 14: mod_base = OTHER; note = 2'-O-methylguanosine-3'-phosphate
  modified_base 15: mod_base = OTHER; note = 2'-O-methyladenosine-3'-phosphate
  modified_base 16: mod_base = OTHER; note = 2'-O-methylcytidine-3'-phosphate
  modified_base 17: mod_base = OTHER; note = 2'-O-methyluridine-3'-phosphate
  modified_base 18: mod_base = OTHER; note = 2'-O-methylcytidine-3'-phosphate
  modified_base 19: mod_base = OTHER; note = 2'-O-methyluridine-3'-phosphate
  modified_base 20: mod_base = OTHER; note = 2'-O-methylguanosine-3'-phosphate
  modified_base 21: mod_base = OTHER; note 2'-O-methyluridine-3'-phosphate-N-[tris(GalNAc-alkyl)-amido decanoyl)]-4-hydroxyprolinol (Hyp-(GalNAc-alkyl)3)
ggctgaagctatggactctgt

SEQ ID NO: 4980 - RNA, 21 nt, synthetic construct
  source 1..21: mol_type = other RNA
  modified_base 1: mod_base = OTHER; note = 2'-O-methylguanosine-3'- phosphorothioate
  modified_base 2: mod_base = OTHER; note = 2'-O-methylcytidine-3'- phosphorothioate
  modified_base 3: mod_base = OTHER; note = 2'-O-methyluridine-3'-phosphate
  modified_base 4: mod_base = OTHER; note = 2'-O-methyladenosine-3'-phosphate
  modified_base 5: mod_base = OTHER; note = 2'-O-methyluridine-3'-phosphate
  modified_base 6: mod_base = OTHER; note = 2'-O-methylguanosine-3'-phosphate
  modified_base 7: mod_base = OTHER; note = 2'-fluoroguanosine-3'-phosphate
  modified_base 8: mod_base = OTHER; note = 2'-O-methyladenosine-3'-phosphate
  modified_base 9: mod_base = OTHER; note = 2'-fluorocytidine-3'-phosphate
  modified_base 10: mod_base = OTHER; note = 2'-fluorouridine-3'-phosphate
  modified_base 11: mod_base = OTHER; note = 2'-fluorocytidine-3'-phosphate
  modified_base 12: mod_base = OTHER; note = 2'-O-methyluridine-3'-phosphate
  modified_base 13: mod_base = OTHER; note = 2'-O-methylguanosine-3'-phosphate
  modified_base 14: mod_base = OTHER; note = 2'-O-methylguanosine-3'-phosphate
  modified_base 15: mod_base = OTHER; note = 2'-O-methylguanosine-3'-phosphate
  modified_base 16: mod_base = OTHER; note = 2'-O-methylcytidine-3'-phosphate
  modified_base 17: mod_base = OTHER; note = 2'-O-methyladenosine-3'-phosphate
  modified_base 18: mod_base = OTHER; note = 2'-O-methylguanosine-3'-phosphate
  modified_base 19: mod_base = OTHER; note = 2'-O-methyladenosine-3'-phosphate
  modified_base 20: mod_base = OTHER; note = 2'-O-methyladenosine-3'-phosphate
  modified_base 21: mod_base = OTHER; note 2'-O-methyluridine-3'-phosphate-N-[tris(GalNAc-alkyl)-amido decanoyl)]-4-hydroxyprolinol (Hyp-(GalNAc-alkyl)3)
gctatggactctgggcagaat

SEQ ID NO: 4981 - RNA, 21 nt, synthetic construct
  source 1..21: mol_type = other RNA
  modified_base 1: mod_base = OTHER; note = 2'-O-methylcytidine-3'- phosphorothioate
  modified_base 2: mod_base = OTHER; note = 2'-O-methyluridine-3'-phosphorothioate
  modified_base 3: mod_base = OTHER; note = 2'-O-methylcytidine-3'-phosphate
  modified_base 4: mod_base = OTHER; note = 2'-O-methyluridine-3'-phosphate
  modified_base 5: mod_base = OTHER; note = 2'-O-methylguanosine-3'-phosphate
  modified_base 6: mod_base = OTHER; note = 2'-O-methylguanosine-3'-phosphate
  modified_base 7: mod_base = OTHER; note = 2'-fluoroguanosine-3'-phosphate
  modified_base 8: mod_base = OTHER; note = 2'-O-methylcytidine-3'-phosphate
  modified_base 9: mod_base = OTHER; note = 2'-fluoroadenosine-3'-phosphate
  modified_base 10: mod_base = OTHER; note = 2'-fluoroguanosine-3'-phosphate
  modified_base 11: mod_base = OTHER; note = 2'-fluoroadenosine-3'-phosphate
  modified_base 12: mod_base = OTHER; note = 2'-O-methyladenosine-3'-phosphate
  modified_base 13: mod_base = OTHER; note = 2'-O-methylcytidine-3'-phosphate
  modified_base 14: mod_base = OTHER; note = 2'-O-methylcytidine-3'-phosphate
  modified_base 15: mod_base = OTHER; note = 2'-O-methyluridine-3'-phosphate
  modified_base 16: mod_base = OTHER; note = 2'-O-methylcytidine-3'-phosphate
  modified_base 17: mod_base = OTHER; note = 2'-O-methylcytidine-3'-phosphate
  modified_base 18: mod_base = OTHER; note = 2'-O-methyladenosine-3'-phosphate
  modified_base 19: mod_base = OTHER; note = 2'-O-methylguanosine-3'-phosphate
  modified_base 20: mod_base = OTHER; note = 2'-O-methylguanosine-3'-phosphate
  modified_base 21: mod_base = OTHER; note 2'-O-methyluridine-3'-phosphate-N-[tris(GalNAc-alkyl)-amido decanoyl)]-4-hydroxyprolinol (Hyp-(GalNAc-alkyl)3)
ctctgggcagaacctccaggt

SEQ ID NO: 4982 - RNA, 21 nt, synthetic construct
  source 1..21: mol_type = other RNA
  modified_base 1: mod_base = OTHER; note = 2'-O-methylguanosine-3'- phosphorothioate
  modified_base 2: mod_base = OTHER; note = 2'-O-methyladenosine-3'- phosphorothioate
  modified_base 3: mod_base = OTHER; note = 2'-O-methyladenosine-3'-phosphate
  modified_base 4: mod_base = OTHER; note = 2'-O-methylcytidine-3'-phosphate
  modified_base 5: mod_base = OTHER; note = 2'-O-methylcytidine-3'-phosphate
  modified_base 6: mod_base = OTHER; note = 2'-O-methyluridine-3'-phosphate
  modified_base 7: mod_base = OTHER; note = 2'-fluorocytidine-3'-phosphate
  modified_base 8: mod_base = OTHER; note = 2'-O-methylcytidine-3'-phosphate
  modified_base 9: mod_base = OTHER; note = 2'-fluoroadenosine-3'-phosphate
  modified_base 10: mod_base = OTHER; note = 2'-fluoroguanosine-3'-phosphate
  modified_base 11: mod_base = OTHER; note = 2'-fluoroguanosine-3'-phosphate
  modified_base 12: mod_base = OTHER; note = 2'-O-methyluridine-3'-phosphate
  modified_base 13: mod_base = OTHER; note = 2'-O-methylcytidine-3'-phosphate
  modified_base 14: mod_base = OTHER; note = 2'-O-methyluridine-3'-phosphate
  modified_base 15: mod_base = OTHER; note = 2'-O-methylcytidine-3'-phosphate
  modified_base 16: mod_base = OTHER; note = 2'-O-methylcytidine-3'-phosphate
  modified_base 17: mod_base = OTHER; note = 2'-O-methyluridine-3'-phosphate
  modified_base 18: mod_base = OTHER; note = 2'-O-methylguanosine-3'-phosphate
  modified_base 19: mod_base = OTHER; note = 2'-O-methylcytidine-3'-phosphate
  modified_base 20: mod_base = OTHER; note = 2'-O-methylcytidine-3'-phosphate
  modified_base 21: mod_base = OTHER; note 2'-O-methyluridine-3'-phosphate-N-[tris(GalNAc-alkyl)-amido decanoyl)]-4-hydroxyprolinol (Hyp-(GalNAc-alkyl)3)
gaacctccaggtctcctgcct

SEQ ID NO: 4983 - RNA, 21 nt, synthetic construct
  source 1..21: mol_type = other RNA
  modified_base 1: mod_base = OTHER; note = 2'-O-methyluridine-3'-phosphorothioate
  modified_base 2: mod_base = OTHER; note = 2'-O-methylcytidine-3'- phosphorothioate
  modified_base 3: mod_base = OTHER; note = 2'-O-methylcytidine-3'-phosphate
  modified_base 4: mod_base = OTHER; note = 2'-O-methyladenosine-3'-phosphate
  modified_base 5: mod_base = OTHER; note = 2'-O-methylguanosine-3'-phosphate
  modified_base 6: mod_base = OTHER; note = 2'-O-methylguanosine-3'-phosphate
  modified_base 7: mod_base = OTHER; note = 2'-fluorouridine-3'-phosphate
  modified_base 8: mod_base = OTHER; note = 2'-O-methylcytidine-3'-phosphate
  modified_base 9: mod_base = OTHER; note = 2'-fluorouridine-3'-phosphate
  modified_base 10: mod_base = OTHER; note = 2'-fluorocytidine-3'-phosphate
  modified_base 11: mod_base = OTHER; note = 2'-fluorocytidine-3'-phosphate
  modified_base 12: mod_base = OTHER; note = 2'-O-methyluridine-3'-phosphate
  modified_base 13: mod_base = OTHER; note = 2'-O-methylguanosine-3'-phosphate
  modified_base 14: mod_base = OTHER; note = 2'-O-methylcytidine-3'-phosphate
  modified_base 15: mod_base = OTHER; note = 2'-O-methylcytidine-3'-phosphate
  modified_base 16: mod_base = OTHER; note = 2'-O-methyluridine-3'-phosphate
  modified_base 17: mod_base = OTHER; note = 2'-O-methylcytidine-3'-phosphate
  modified_base 18: mod_base = OTHER; note = 2'-O-methyladenosine-3'-phosphate
  modified_base 19: mod_base = OTHER; note = 2'-O-methyladenosine-3'-phosphate
  modified_base 20: mod_base = OTHER; note = 2'-O-methyluridine-3'-phosphate
  modified_base 21: mod_base = OTHER; note 2'-O-methyluridine-3'-phosphate-N-[tris(GalNAc-alkyl)-amido decanoyl)]-4-hydroxyprolinol (Hyp-(GalNAc-alkyl)3)
tccaggtctcctgcctcaatt

SEQ ID NO: 4984 - RNA, 21 nt, synthetic construct
  source 1..21: mol_type = other RNA
  modified_base 1: mod_base = OTHER; note = 2'-O-methyluridine-3'-phosphorothioate
  modified_base 2: mod_base = OTHER; note = 2'-O-methylcytidine-3'- phosphorothioate
  modified_base 3: mod_base = OTHER; note = 2'-O-methylcytidine-3'-phosphate
  modified_base 4: mod_base = OTHER; note = 2'-O-methyluridine-3'-phosphate
  modified_base 5: mod_base = OTHER; note = 2'-O-methylguanosine-3'-phosphate
  modified_base 6: mod_base = OTHER; note = 2'-O-methylcytidine-3'-phosphate
  modified_base 7: mod_base = OTHER; note = 2'-fluorocytidine-3'-phosphate
  modified_base 8: mod_base = OTHER; note = 2'-O-methyluridine-3'-phosphate
  modified_base 9: mod_base = OTHER; note = 2'-fluorocytidine-3'-phosphate
  modified_base 10: mod_base = OTHER; note = 2'-fluoroadenosine-3'-phosphate
  modified_base 11: mod_base = OTHER; note = 2'-fluoroadenosine-3'-phosphate
  modified_base 12: mod_base = OTHER; note = 2'-O-methyluridine-3'-phosphate
  modified_base 13: mod_base = OTHER; note = 2'-O-methylguanosine-3'-phosphate
  modified_base 14: mod_base = OTHER; note = 2'-O-methylcytidine-3'-phosphate
  modified_base 15: mod_base = OTHER; note = 2'-O-methyluridine-3'-phosphate
  modified_base 16: mod_base = OTHER; note = 2'-O-methylguanosine-3'-phosphate
  modified_base 17: mod_base = OTHER; note = 2'-O-methyladenosine-3'-phosphate
  modified_base 18: mod_base = OTHER; note = 2'-O-methylguanosine-3'-phosphate
  modified_base 19: mod_base = OTHER; note = 2'-O-methylcytidine-3'-phosphate
  modified_base 20: mod_base = OTHER; note = 2'-O-methyladenosine-3'-phosphate
  modified_base 21: mod_base = OTHER; note 2'-O-methyluridine-3'-phosphate-N-[tris(GalNAc-alkyl)-amido decanoyl)]-4-hydroxyprolinol (Hyp-(GalNAc-alkyl)3)
tcctgcctcaatgctgagcat

SEQ ID NO: 4985 - RNA, 21 nt, synthetic construct
  source 1..21: mol_type = other RNA
  modified_base 1: mod_base = OTHER; note = 2'-O-methyluridine-3'-phosphorothioate
  modified_base 2: mod_base = OTHER; note = 2'-O-methylcytidine-3'- phosphorothioate
  modified_base 3: mod_base = OTHER; note = 2'-O-methyladenosine-3'-phosphate
  modified_base 4: mod_base = OTHER; note = 2'-O-methyladenosine-3'-phosphate
  modified_base 5: mod_base = OTHER; note = 2'-O-methyluridine-3'-phosphate
  modified_base 6: mod_base = OTHER; note = 2'-O-methylguanosine-3'-phosphate
  modified_base 7: mod_base = OTHER; note = 2'-fluorocytidine-3'-phosphate
  modified_base 8: mod_base = OTHER; note = 2'-O-methyluridine-3'-phosphate
  modified_base 9: mod_base = OTHER; note = 2'-fluoroguanosine-3'-phosphate
  modified_base 10: mod_base = OTHER; note = 2'-fluoroadenosine-3'-phosphate
  modified_base 11: mod_base = OTHER; note = 2'-fluoroguanosine-3'-phosphate
  modified_base 12: mod_base = OTHER; note = 2'-O-methylcytidine-3'-phosphate
  modified_base 13: mod_base = OTHER; note = 2'-O-methyladenosine-3'-phosphate
  modified_base 14: mod_base = OTHER; note = 2'-O-methylguanosine-3'-phosphate
  modified_base 15: mod_base = OTHER; note = 2'-O-methyladenosine-3'-phosphate
  modified_base 16: mod_base = OTHER; note = 2'-O-methyladenosine-3'-phosphate
  modified_base 17: mod_base = OTHER; note = 2'-O-methylcytidine-3'-phosphate
  modified_base 18: mod_base = OTHER; note = 2'-O-methylcytidine-3'-phosphate
  modified_base 19: mod_base = OTHER; note = 2'-O-methyladenosine-3'-phosphate
  modified_base 20: mod_base = OTHER; note = 2'-O-methylguanosine-3'-phosphate
  modified_base 21: mod_base = OTHER; note 2'-O-methyluridine-3'-phosphate-N-[tris(GalNAc-alkyl)-amido decanoyl)]-4-hydroxyprolinol (Hyp-(GalNAc-alkyl)3)
tcaatgctgagcagaaccagt

SEQ ID NO: 4986 - RNA, 21 nt, synthetic construct
  source 1..21: mol_type = other RNA
  modified_base 1: mod_base = OTHER; note = 2'-O-methylguanosine-3'- phosphorothioate
  modified_base 2: mod_base = OTHER; note = 2'-O-methylcytidine-3'- phosphorothioate
  modified_base 3: mod_base = OTHER; note = 2'-O-methyluridine-3'-phosphate
  modified_base 4: mod_base = OTHER; note = 2'-O-methylguanosine-3'-phosphate
  modified_base 5: mod_base = OTHER; note = 2'-O-methyladenosine-3'-phosphate
  modified_base 6: mod_base = OTHER; note = 2'-O-methylguanosine-3'-phosphate
  modified_base 7: mod_base = OTHER; note = 2'-fluorocytidine-3'-phosphate
  modified_base 8: mod_base = OTHER; note = 2'-O-methyladenosine-3'-phosphate
  modified_base 9: mod_base = OTHER; note = 2'-fluoroguanosine-3'-phosphate
  modified_base 10: mod_base = OTHER; note = 2'-fluoroadenosine-3'-phosphate
  modified_base 11: mod_base = OTHER; note = 2'-fluoroadenosine-3'-phosphate
  modified_base 12: mod_base = OTHER; note = 2'-O-methylcytidine-3'-phosphate
  modified_base 13: mod_base = OTHER; note = 2'-O-methylcytidine-3'-phosphate
  modified_base 14: mod_base = OTHER; note = 2'-O-methyladenosine-3'-phosphate
  modified_base 15: mod_base = OTHER; note = 2'-O-methylguanosine-3'-phosphate
  modified_base 16: mod_base = OTHER; note = 2'-O-methylcytidine-3'-phosphate
  modified_base 17: mod_base = OTHER; note = 2'-O-methyladenosine-3'-phosphate
  modified_base 18: mod_base = OTHER; note = 2'-O-methylcytidine-3'-phosphate
  modified_base 19: mod_base = OTHER; note = 2'-O-methylcytidine-3'-phosphate
  modified_base 20: mod_base = OTHER; note = 2'-O-methyluridine-3'-phosphate
  modified_base 21: mod_base = OTHER; note 2'-O-methyluridine-3'-phosphate-N-[tris(GalNAc-alkyl)-amido decanoyl)]-4-hydroxyprolinol (Hyp-(GalNAc-alkyl)3)
gctgagcagaaccagcacctt

SEQ ID NO: 4987 - RNA, 21 nt, synthetic construct
  source 1..21: mol_type = other RNA
  modified_base 1: mod_base = OTHER; note = 2'-O-methylguanosine-3'- phosphorothioate
  modified_base 2: mod_base = OTHER; note = 2'-O-methylcytidine-3'- phosphorothioate
  modified_base 3: mod_base = OTHER; note = 2'-O-methyladenosine-3'-phosphate
  modified_base 4: mod_base = OTHER; note = 2'-O-methyluridine-3'-phosphate
  modified_base 5: mod_base = OTHER; note = 2'-O-methylcytidine-3'-phosphate
  modified_base 6: mod_base = OTHER; note = 2'-O-methylguanosine-3'-phosphate
  modified_base 7: mod_base = OTHER; note = 2'-fluoroguanosine-3'-phosphate
  modified_base 8: mod_base = OTHER; note = 2'-O-methylguanosine-3'-phosphate
  modified_base 9: mod_base = OTHER; note = 2'-fluorouridine-3'-phosphate
  modified_base 10: mod_base = OTHER; note = 2'-fluoroguanosine-3'-phosphate
  modified_base 11: mod_base = OTHER; note = 2'-fluoroguanosine-3'-phosphate
  modified_base 12: mod_base = OTHER; note = 2'-O-methylcytidine-3'-phosphate
  modified_base 13: mod_base = OTHER; note = 2'-O-methyladenosine-3'-phosphate
  modified_base 14: mod_base = OTHER; note = 2'-O-methylcytidine-3'-phosphate
  modified_base 15: mod_base = OTHER; note = 2'-O-methyladenosine-3'-phosphate
  modified_base 16: mod_base = OTHER; note = 2'-O-methylguanosine-3'-phosphate
  modified_base 17: mod_base = OTHER; note = 2'-O-methyluridine-3'-phosphate
  modified_base 18: mod_base = OTHER; note = 2'-O-methyladenosine-3'-phosphate
  modified_base 19: mod_base = OTHER; note = 2'-O-methyluridine-3'-phosphate
  modified_base 20: mod_base = OTHER; note = 2'-O-methylguanosine-3'-phosphate
  modified_base 21: mod_base = OTHER; note 2'-O-methyluridine-3'-phosphate-N-[tris(GalNAc-alkyl)-amido decanoyl)]-4-hydroxyprolinol (Hyp-(GalNAc-alkyl)3)
gcatcgggtggcacagtatgt

SEQ ID NO: 4988 - RNA, 21 nt, synthetic construct
  source 1..21: mol_type = other RNA
  modified_base 1: mod_base = OTHER; note = 2'-O-methylcytidine-3'- phosphorothioate
  modified_base 2: mod_base = OTHER; note = 2'-O-methyluridine-3'-phosphorothioate
  modified_base 3: mod_base = OTHER; note = 2'-O-methylcytidine-3'-phosphate
  modified_base 4: mod_base = OTHER; note = 2'-O-methylcytidine-3'-phosphate
  modified_base 5: mod_base = OTHER; note = 2'-O-methyluridine-3'-phosphate
  modified_base 6: mod_base = OTHER; note = 2'-O-methylguanosine-3'-phosphate
  modified_base 7: mod_base = OTHER; note = 2'-fluoroguanosine-3'-phosphate
  modified_base 8: mod_base = OTHER; note = 2'-O-methyluridine-3'-phosphate
  modified_base 9: mod_base = OTHER; note = 2'-fluoroguanosine-3'-phosphate
  modified_base 10: mod_base = OTHER; note = 2'-fluoroguanosine-3'-phosphate
  modified_base 11: mod_base = OTHER; note = 2'-fluoroadenosine-3'-phosphate
  modified_base 12: mod_base = OTHER; note = 2'-O-methyluridine-3'-phosphate
  modified_base 13: mod_base = OTHER; note = 2'-O-methylguanosine-3'-phosphate
  modified_base 14: mod_base = OTHER; note = 2'-O-methylcytidine-3'-phosphate
  modified_base 15: mod_base = OTHER; note = 2'-O-methylguanosine-3'-phosphate
  modified_base 16: mod_base = OTHER; note = 2'-O-methylguanosine-3'-phosphate
  modified_base 17: mod_base = OTHER; note = 2'-O-methyladenosine-3'-phosphate
  modified_base 18: mod_base = OTHER; note = 2'-O-methylguanosine-3'-phosphate
  modified_base 19: mod_base = OTHER; note = 2'-O-methyluridine-3'-phosphate
  modified_base 20: mod_base = OTHER; note = 2'-O-methyladenosine-3'-phosphate
  modified_base 21: mod_base = OTHER; note 2'-O-methyluridine-3'-phosphate-N-[tris(GalNAc-alkyl)-amido decanoyl)]-4-hydroxyprolinol (Hyp-(GalNAc-alkyl)3)
ctcctggtggatgcggagtat

SEQ ID NO: 4989 - RNA, 21 nt, synthetic construct
  source 1..21: mol_type = other RNA
  modified_base 1: mod_base = OTHER; note = 2'-O-methyluridine-3'-phosphorothioate
  modified_base 2: mod_base = OTHER; note = 2'-O-methylguanosine-3'- phosphorothioate
  modified_base 3: mod_base = OTHER; note = 2'-O-methylguanosine-3'-phosphate
  modified_base 4: mod_base = OTHER; note = 2'-O-methyladenosine-3'-phosphate
  modified_base 5: mod_base = OTHER; note = 2'-O-methyluridine-3'-phosphate
  modified_base 6: mod_base = OTHER; note = 2'-O-methylguanosine-3'-phosphate
  modified_base 7: mod_base = OTHER; note = 2'-fluorocytidine-3'-phosphate
  modified_base 8: mod_base = OTHER; note = 2'-O-methylguanosine-3'-phosphate
  modified_base 9: mod_base = OTHER; note = 2'-fluoroguanosine-3'-phosphate
  modified_base 10: mod_base = OTHER; note = 2'-fluoroadenosine-3'-phosphate
  modified_base 11: mod_base = OTHER; note = 2'-fluoroguanosine-3'-phosphate
  modified_base 12: mod_base = OTHER; note = 2'-O-methyluridine-3'-phosphate
  modified_base 13: mod_base = OTHER; note = 2'-O-methyladenosine-3'-phosphate
  modified_base 14: mod_base = OTHER; note = 2'-O-methylcytidine-3'-phosphate
  modified_base 15: mod_base = OTHER; note = 2'-O-methyladenosine-3'-phosphate
  modified_base 16: mod_base = OTHER; note = 2'-O-methylcytidine-3'-phosphate
  modified_base 17: mod_base = OTHER; note = 2'-O-methylcytidine-3'-phosphate
  modified_base 18: mod_base = OTHER; note = 2'-O-methyluridine-3'-phosphate
  modified_base 19: mod_base = OTHER; note = 2'-O-methylcytidine-3'-phosphate
  modified_base 20: mod_base = OTHER; note = 2'-O-methyladenosine-3'-phosphate
  modified_base 21: mod_base = OTHER; note 2'-O-methyluridine-3'-phosphate-N-[tris(GalNAc-alkyl)-amido decanoyl)]-4-hydroxyprolinol (Hyp-(GalNAc-alkyl)3)
tggatgcggagtacacctcat

SEQ ID NO: 4990 - RNA, 21 nt, synthetic construct
  source 1..21: mol_type = other RNA
  modified_base 1: mod_base = OTHER; note = 2'-O-methylguanosine-3'- phosphorothioate
  modified_base 2: mod_base = OTHER; note = 2'-O-methylcytidine-3'- phosphorothioate
  modified_base 3: mod_base = OTHER; note = 2'-O-methylguanosine-3'-phosphate
  modified_base 4: mod_base = OTHER; note = 2'-O-methylguanosine-3'-phosphate
  modified_base 5: mod_base = OTHER; note = 2'-O-methyladenosine-3'-phosphate
  modified_base 6: mod_base = OTHER; note = 2'-O-methylguanosine-3'-phosphate
  modified_base 7: mod_base = OTHER; note = 2'-fluorouridine-3'-phosphate
  modified_base 8: mod_base = OTHER; note = 2'-O-methyladenosine-3'-phosphate
  modified_base 9: mod_base = OTHER; note = 2'-fluorocytidine-3'-phosphate
  modified_base 10: mod_base = OTHER; note = 2'-fluoroadenosine-3'-phosphate
  modified_base 11: mod_base = OTHER; note = 2'-fluorocytidine-3'-phosphate
  modified_base 12: mod_base = OTHER; note = 2'-O-methylcytidine-3'-phosphate
  modified_base 13: mod_base = OTHER; note = 2'-O-methyluridine-3'-phosphate
  modified_base 14: mod_base = OTHER; note = 2'-O-methylcytidine-3'-phosphate
  modified_base 15: mod_base = OTHER; note = 2'-O-methyladenosine-3'-phosphate
  modified_base 16: mod_base = OTHER; note = 2'-O-methylcytidine-3'-phosphate
  modified_base 17: mod_base = OTHER; note = 2'-O-methyluridine-3'-phosphate
  modified_base 18: mod_base = OTHER; note = 2'-O-methylguanosine-3'-phosphate
  modified_base 19: mod_base = OTHER; note = 2'-O-methyladenosine-3'-phosphate
  modified_base 20: mod_base = OTHER; note = 2'-O-methyladenosine-3'-phosphate
  modified_base 21: mod_base = OTHER; note 2'-O-methyluridine-3'-phosphate-N-[tris(GalNAc-alkyl)-amido decanoyl)]-4-hydroxyprolinol (Hyp-(GalNAc-alkyl)3)
gcggagtacacctcactgaat

SEQ ID NO: 4991 - RNA, 21 nt, synthetic construct
  source 1..21: mol_type = other RNA
  modified_base 1: mod_base = OTHER; note = 2'-O-methylguanosine-3'- phosphorothioate
  modified_base 2: mod_base = OTHER; note = 2'-O-methyluridine-3'-phosphorothioate
  modified_base 3: mod_base = OTHER; note = 2'-O-methyladenosine-3'-phosphate
  modified_base 4: mod_base = OTHER; note = 2'-O-methylcytidine-3'-phosphate
  modified_base 5: mod_base = OTHER; note = 2'-O-methyladenosine-3'-phosphate
  modified_base 6: mod_base = OTHER; note = 2'-O-methylcytidine-3'-phosphate
  modified_base 7: mod_base = OTHER; note = 2'-fluorocytidine-3'-phosphate
  modified_base 8: mod_base = OTHER; note = 2'-O-methyluridine-3'-phosphate
  modified_base 9: mod_base = OTHER; note = 2'-fluorocytidine-3'-phosphate
  modified_base 10: mod_base = OTHER; note = 2'-fluoroadenosine-3'-phosphate
  modified_base 11: mod_base = OTHER; note = 2'-fluorocytidine-3'-phosphate
  modified_base 12: mod_base = OTHER; note = 2'-O-methyluridine-3'-phosphate
  modified_base 13: mod_base = OTHER; note = 2'-O-methylguanosine-3'-phosphate
  modified_base 14: mod_base = OTHER; note = 2'-O-methyladenosine-3'-phosphate
  modified_base 15: mod_base = OTHER; note = 2'-O-methyladenosine-3'-phosphate
  modified_base 16: mod_base = OTHER; note = 2'-O-methylcytidine-3'-phosphate
  modified_base 17: mod_base = OTHER; note = 2'-O-methylcytidine-3'-phosphate
  modified_base 18: mod_base = OTHER; note = 2'-O-methylcytidine-3'-phosphate
  modified_base 19: mod_base = OTHER; note = 2'-O-methyluridine-3'-phosphate
  modified_base 20: mod_base = OTHER; note = 2'-O-methylguanosine-3'-phosphate
  modified_base 21: mod_base = OTHER; note 2'-O-methyluridine-3'-phosphate-N-[tris(GalNAc-alkyl)-amido decanoyl)]-4-hydroxyprolinol (Hyp-(GalNAc-alkyl)3)
gtacacctcactgaaccctgt

SEQ ID NO: 4992 - RNA, 21 nt, synthetic construct
  source 1..21: mol_type = other RNA
  modified_base 1: mod_base = OTHER; note = 2'-O-methyluridine-3'-phosphorothioate
  modified_base 2: mod_base = OTHER; note = 2'-O-methylcytidine-3'- phosphorothioate
  modified_base 3: mod_base = OTHER; note = 2'-O-methyladenosine-3'-phosphate
  modified_base 4: mod_base = OTHER; note = 2'-O-methylcytidine-3'-phosphate
  modified_base 5: mod_base = OTHER; note = 2'-O-methyluridine-3'-phosphate
  modified_base 6: mod_base = OTHER; note = 2'-O-methylguanosine-3'-phosphate
  modified_base 7: mod_base = OTHER; note = 2'-fluoroadenosine-3'-phosphate
  modified_base 8: mod_base = OTHER; note = 2'-O-methyladenosine-3'-phosphate
  modified_base 9: mod_base = OTHER; note = 2'-fluorocytidine-3'-phosphate
  modified_base 10: mod_base = OTHER; note = 2'-fluorocytidine-3'-phosphate
  modified_base 11: mod_base = OTHER; note = 2'-fluorocytidine-3'-phosphate
  modified_base 12: mod_base = OTHER; note = 2'-O-methyluridine-3'-phosphate
  modified_base 13: mod_base = OTHER; note = 2'-O-methylguanosine-3'-phosphate
  modified_base 14: mod_base = OTHER; note = 2'-O-methylcytidine-3'-phosphate
  modified_base 15: mod_base = OTHER; note = 2'-O-methylguanosine-3'-phosphate
  modified_base 16: mod_base = OTHER; note = 2'-O-methylcytidine-3'-phosphate
  modified_base 17: mod_base = OTHER; note = 2'-O-methyluridine-3'-phosphate
  modified_base 18: mod_base = OTHER; note = 2'-O-methylcytidine-3'-phosphate
  modified_base 19: mod_base = OTHER; note = 2'-O-methyluridine-3'-phosphate
  modified_base 20: mod_base = OTHER; note = 2'-O-methylcytidine-3'-phosphate
  modified_base 21: mod_base = OTHER; note 2'-O-methyluridine-3'-phosphate-N-[tris(GalNAc-alkyl)-amido decanoyl)]-4-hydroxyprolinol (Hyp-(GalNAc-alkyl)3)
tcactgaaccctgcgctctct

SEQ ID NO: 4993 - RNA, 21 nt, synthetic construct
  source 1..21: mol_type = other RNA
  modified_base 1: mod_base = OTHER; note = 2'-O-methyladenosine-3'- phosphorothioate
  modified_base 2: mod_base = OTHER; note = 2'-O-methyladenosine-3'- phosphorothioate
  modified_base 3: mod_base = OTHER; note = 2'-O-methylcytidine-3'-phosphate
  modified_base 4: mod_base = OTHER; note = 2'-O-methylcytidine-3'-phosphate
  modified_base 5: mod_base = OTHER; note = 2'-O-methylcytidine-3'-phosphate
  modified_base 6: mod_base = OTHER; note = 2'-O-methyluridine-3'-phosphate
  modified_base 7: mod_base = OTHER; note = 2'-fluoroguanosine-3'-phosphate
  modified_base 8: mod_base = OTHER; note = 2'-O-methylcytidine-3'-phosphate
  modified_base 9: mod_base = OTHER; note = 2'-fluoroguanosine-3'-phosphate
  modified_base 10: mod_base = OTHER; note = 2'-fluorocytidine-3'-phosphate
  modified_base 11: mod_base = OTHER; note = 2'-fluorouridine-3'-phosphate
  modified_base 12: mod_base = OTHER; note = 2'-O-methylcytidine-3'-phosphate
  modified_base 13: mod_base = OTHER; note = 2'-O-methyluridine-3'-phosphate
  modified_base 14: mod_base = OTHER; note = 2'-O-methylcytidine-3'-phosphate
  modified_base 15: mod_base = OTHER; note = 2'-O-methylguanosine-3'-phosphate
  modified_base 16: mod_base = OTHER; note = 2'-O-methylcytidine-3'-phosphate
  modified_base 17: mod_base = OTHER; note = 2'-O-methyluridine-3'-phosphate
  modified_base 18: mod_base = OTHER; note = 2'-O-methylguanosine-3'-phosphate
  modified_base 19: mod_base = OTHER; note = 2'-O-methylcytidine-3'-phosphate
  modified_base 20: mod_base = OTHER; note = 2'-O-methyluridine-3'-phosphate
  modified_base 21: mod_base = OTHER; note 2'-O-methyluridine-3'-phosphate-N-[tris(GalNAc-alkyl)-amido decanoyl)]-4-hydroxyprolinol (Hyp-(GalNAc-alkyl)3)
aaccctgcgctctcgctgctt

SEQ ID NO: 4994 - RNA, 21 nt, synthetic construct
  source 1..21: mol_type = other RNA
  modified_base 1: mod_base = OTHER; note = 2'-O-methylcytidine-3'- phosphorothioate
  modified_base 2: mod_base = OTHER; note = 2'-O-methylcytidine-3'- phosphorothioate
  modified_base 3: mod_base = OTHER; note = 2'-O-methylcytidine-3'-phosphate
  modified_base 4: mod_base = OTHER; note = 2'-O-methyluridine-3'-phosphate
  modified_base 5: mod_base = OTHER; note = 2'-O-methylguanosine-3'-phosphate
  modified_base 6: mod_base = OTHER; note = 2'-O-methylguanosine-3'-phosphate
  modified_base 7: mod_base = OTHER; note = 2'-fluoroguanosine-3'-phosphate
  modified_base 8: mod_base = OTHER; note = 2'-O-methyluridine-3'-phosphate
  modified_base 9: mod_base = OTHER; note = 2'-fluoroguanosine-3'-phosphate
  modified_base 10: mod_base = OTHER; note = 2'-fluorouridine-3'-phosphate
  modified_base 11: mod_base = OTHER; note = 2'-fluoroguanosine-3'-phosphate
  modified_base 12: mod_base = OTHER; note = 2'-O-methylguanosine-3'-phosphate
  modified_base 13: mod_base = OTHER; note = 2'-O-methyladenosine-3'-phosphate
  modified_base 14: mod_base = OTHER; note = 2'-O-methyladenosine-3'-phosphate
  modified_base 15: mod_base = OTHER; note = 2'-O-methylcytidine-3'-phosphate
  modified_base 16: mod_base = OTHER; note = 2'-O-methyladenosine-3'-phosphate
  modified_base 17: mod_base = OTHER; note = 2'-O-methylcytidine-3'-phosphate
  modified_base 18: mod_base = OTHER; note = 2'-O-methylcytidine-3'-phosphate
  modified_base 19: mod_base = OTHER; note = 2'-O-methyluridine-3'-phosphate
  modified_base 20: mod_base = OTHER; note = 2'-O-methyladenosine-3'-phosphate
  modified_base 21: mod_base = OTHER; note 2'-O-methyluridine-3'-phosphate-N-[tris(GalNAc-alkyl)-amido decanoyl)]-4-hydroxyprolinol (Hyp-(GalNAc-alkyl)3)
ccctgggtgtggaacacctat

SEQ ID NO: 4995 - RNA, 21 nt, synthetic construct
  source 1..21: mol_type = other RNA
  modified_base 1: mod_base = OTHER; note = 2'-O-methylguanosine-3'- phosphorothioate
  modified_base 2: mod_base = OTHER; note = 2'-O-methylguanosine-3'- phosphorothioate
  modified_base 3: mod_base = OTHER; note = 2'-O-methyluridine-3'-phosphate
  modified_base 4: mod_base = OTHER; note = 2'-O-methylguanosine-3'-phosphate
  modified_base 5: mod_base = OTHER; note = 2'-O-methyluridine-3'-phosphate
  modified_base 6: mod_base = OTHER; note = 2'-O-methylguanosine-3'-phosphate
  modified_base 7: mod_base = OTHER; note = 2'-fluoroguanosine-3'-phosphate
  modified_base 8: mod_base = OTHER; note = 2'-O-methyladenosine-3'-phosphate
  modified_base 9: mod_base = OTHER; note = 2'-fluoroadenosine-3'-phosphate
  modified_base 10: mod_base = OTHER; note = 2'-fluorocytidine-3'-phosphate
  modified_base 11: mod_base = OTHER; note = 2'-fluoroadenosine-3'-phosphate
  modified_base 12: mod_base = OTHER; note = 2'-O-methylcytidine-3'-phosphate
  modified_base 13: mod_base = OTHER; note = 2'-O-methylcytidine-3'-phosphate
  modified_base 14: mod_base = OTHER; note = 2'-O-methyluridine-3'-phosphate
  modified_base 15: mod_base = OTHER; note = 2'-O-methyladenosine-3'-phosphate
  modified_base 16: mod_base = OTHER; note = 2'-O-methylcytidine-3'-phosphate
  modified_base 17: mod_base = OTHER; note = 2'-O-methylcytidine-3'-phosphate
  modified_base 18: mod_base = OTHER; note = 2'-O-methyladenosine-3'-phosphate
  modified_base 19: mod_base = OTHER; note = 2'-O-methylguanosine-3'-phosphate
  modified_base 20: mod_base = OTHER; note = 2'-O-methylguanosine-3'-phosphate
  modified_base 21: mod_base = OTHER; note 2'-O-methyluridine-3'-phosphate-N-[tris(GalNAc-alkyl)-amido decanoyl)]-4-hydroxyprolinol (Hyp-(GalNAc-alkyl)3)
ggtgtggaacacctaccaggt

SEQ ID NO: 4996 - RNA, 21 nt, synthetic construct
  source 1..21: mol_type = other RNA
  modified_base 1: mod_base = OTHER; note = 2'-O-methyladenosine-3'- phosphorothioate
  modified_base 2: mod_base = OTHER; note = 2'-O-methylcytidine-3'- phosphorothioate
  modified_base 3: mod_base = OTHER; note = 2'-O-methylcytidine-3'-phosphate
  modified_base 4: mod_base = OTHER; note = 2'-O-methyluridine-3'-phosphate
  modified_base 5: mod_base = OTHER; note = 2'-O-methyladenosine-3'-phosphate
  modified_base 6: mod_base = OTHER; note = 2'-O-methylcytidine-3'-phosphate
  modified_base 7: mod_base = OTHER; note = 2'-fluorocytidine-3'-phosphate
  modified_base 8: mod_base = OTHER; note = 2'-O-methyladenosine-3'-phosphate
  modified_base 9: mod_base = OTHER; note = 2'-fluoroguanosine-3'-phosphate
  modified_base 10: mod_base = OTHER; note = 2'-fluoroguanosine-3'-phosphate
  modified_base 11: mod_base = OTHER; note = 2'-fluorocytidine-3'-phosphate
  modified_base 12: mod_base = OTHER; note = 2'-O-methylcytidine-3'-phosphate
  modified_base 13: mod_base = OTHER; note = 2'-O-methyluridine-3'-phosphate
  modified_base 14: mod_base = OTHER; note = 2'-O-methylguanosine-3'-phosphate
  modified_base 15: mod_base = OTHER; note = 2'-O-methyluridine-3'-phosphate
  modified_base 16: mod_base = OTHER; note = 2'-O-methylcytidine-3'-phosphate
  modified_base 17: mod_base = OTHER; note = 2'-O-methyluridine-3'-phosphate
  modified_base 18: mod_base = OTHER; note = 2'-O-methyladenosine-3'-phosphate
  modified_base 19: mod_base = OTHER; note = 2'-O-methyladenosine-3'-phosphate
  modified_base 20: mod_base = OTHER; note = 2'-O-methyladenosine-3'-phosphate
  modified_base 21: mod_base = OTHER; note 2'-O-methyluridine-3'-phosphate-N-[tris(GalNAc-alkyl)-amido decanoyl)]-4-hydroxyprolinol (Hyp-(GalNAc-alkyl)3)
acctaccaggcctgtctaaat

SEQ ID NO: 4997 - RNA, 21 nt, synthetic construct
  source 1..21: mol_type = other RNA
  modified_base 1: mod_base = OTHER; note = 2'-O-methylguanosine-3'- phosphorothioate
  modified_base 2: mod_base = OTHER; note = 2'-O-methylcytidine-3'- phosphorothioate
  modified_base 3: mod_base = OTHER; note = 2'-O-methylcytidine-3'-phosphate
  modified_base 4: mod_base = OTHER; note = 2'-O-methyluridine-3'-phosphate
  modified_base 5: mod_base = OTHER; note = 2'-O-methylguanosine-3'-phosphate
  modified_base 6: mod_base = OTHER; note = 2'-O-methyluridine-3'-phosphate
  modified_base 7: mod_base = OTHER; note = 2'-fluorocytidine-3'-phosphate
  modified_base 8: mod_base = OTHER; note = 2'-O-methyluridine-3'-phosphate
  modified_base 9: mod_base = OTHER; note = 2'-fluoroadenosine-3'-phosphate
  modified_base 10: mod_base = OTHER; note = 2'-fluoroadenosine-3'-phosphate
  modified_base 11: mod_base = OTHER; note = 2'-fluoroadenosine-3'-phosphate
  modified_base 12: mod_base = OTHER; note = 2'-O-methylguanosine-3'-phosphate
  modified_base 13: mod_base = OTHER; note = 2'-O-methylguanosine-3'-phosphate
  modified_base 14: mod_base = OTHER; note = 2'-O-methyladenosine-3'-phosphate
  modified_base 15: mod_base = OTHER; note = 2'-O-methylcytidine-3'-phosphate
  modified_base 16: mod_base = OTHER; note = 2'-O-methyladenosine-3'-phosphate
  modified_base 17: mod_base = OTHER; note = 2'-O-methylcytidine-3'-phosphate
  modified_base 18: mod_base = OTHER; note = 2'-O-methyladenosine-3'-phosphate
  modified_base 19: mod_base = OTHER; note = 2'-O-methyluridine-3'-phosphate
  modified_base 20: mod_base = OTHER; note = 2'-O-methyluridine-3'-phosphate
  modified_base 21: mod_base = OTHER; note 2'-O-methyluridine-3'-phosphate-N-[tris(GalNAc-alkyl)-amido decanoyl)]-4-hydroxyprolinol (Hyp-(GalNAc-alkyl)3)
gcctgtctaaaggacacattt

SEQ ID NO: 4998 - RNA, 21 nt, synthetic construct
  source 1..21: mol_type = other RNA
  modified_base 1: mod_base = OTHER; note = 2'-O-methyluridine-3'-phosphorothioate
  modified_base 2: mod_base = OTHER; note = 2'-O-methylcytidine-3'- phosphorothioate
  modified_base 3: mod_base = OTHER; note = 2'-O-methyluridine-3'-phosphate
  modified_base 4: mod_base = OTHER; note = 2'-O-methyladenosine-3'-phosphate
  modified_base 5: mod_base = OTHER; note = 2'-O-methyladenosine-3'-phosphate
  modified_base 6: mod_base = OTHER; note = 2'-O-methyladenosine-3'-phosphate
  modified_base 7: mod_base = OTHER; note = 2'-fluoroguanosine-3'-phosphate
  modified_base 8: mod_base = OTHER; note = 2'-O-methylguanosine-3'-phosphate
  modified_base 9: mod_base = OTHER; note = 2'-fluoroadenosine-3'-phosphate
  modified_base 10: mod_base = OTHER; note = 2'-fluorocytidine-3'-phosphate
  modified_base 11: mod_base = OTHER; note = 2'-fluoroadenosine-3'-phosphate
  modified_base 12: mod_base = OTHER; note = 2'-O-methylcytidine-3'-phosphate
  modified_base 13: mod_base = OTHER; note = 2'-O-methyladenosine-3'-phosphate
  modified_base 14: mod_base = OTHER; note = 2'-O-methyluridine-3'-phosphate
  modified_base 15: mod_base = OTHER; note = 2'-O-methyluridine-3'-phosphate
  modified_base 16: mod_base = OTHER; note = 2'-O-methylcytidine-3'-phosphate
  modified_base 17: mod_base = OTHER; note = 2'-O-methylguanosine-3'-phosphate
  modified_base 18: mod_base = OTHER; note = 2'-O-methyladenosine-3'-phosphate
  modified_base 19: mod_base = OTHER; note = 2'-O-methylguanosine-3'-phosphate
  modified_base 20: mod_base = OTHER; note = 2'-O-methylcytidine-3'-phosphate
  modified_base 21: mod_base = OTHER; note 2'-O-methyluridine-3'-phosphate-N-[tris(GalNAc-alkyl)-amido decanoyl)]-4-hydroxyprolinol (Hyp-(GalNAc-alkyl)3)
tctaaaggacacattcgagct

SEQ ID NO: 4999 - RNA, 21 nt, synthetic construct
  source 1..21: mol_type = other RNA
  modified_base 1: mod_base = OTHER; note = 2'-O-methylguanosine-3'- phosphorothioate
  modified_base 2: mod_base = OTHER; note = 2'-O-methylguanosine-3'- phosphorothioate
  modified_base 3: mod_base = OTHER; note = 2'-O-methyladenosine-3'-phosphate
  modified_base 4: mod_base = OTHER; note = 2'-O-methylcytidine-3'-phosphate
  modified_base 5: mod_base = OTHER; note = 2'-O-methyladenosine-3'-phosphate
  modified_base 6: mod_base = OTHER; note = 2'-O-methylcytidine-3'-phosphate
  modified_base 7: mod_base = OTHER; note = 2'-fluoroadenosine-3'-phosphate
  modified_base 8: mod_base = OTHER; note = 2'-O-methyluridine-3'-phosphate
  modified_base 9: mod_base = OTHER; note = 2'-fluorouridine-3'-phosphate
  modified_base 10: mod_base = OTHER; note = 2'-fluorocytidine-3'-phosphate
  modified_base 11: mod_base = OTHER; note = 2'-fluoroguanosine-3'-phosphate
  modified_base 12: mod_base = OTHER; note = 2'-O-methyladenosine-3'-phosphate
  modified_base 13: mod_base = OTHER; note = 2'-O-methylguanosine-3'-phosphate
  modified_base 14: mod_base = OTHER; note = 2'-O-methylcytidine-3'-phosphate
  modified_base 15: mod_base = OTHER; note = 2'-O-methylguanosine-3'-phosphate
  modified_base 16: mod_base = OTHER; note = 2'-O-methylguanosine-3'-phosphate
  modified_base 17: mod_base = OTHER; note = 2'-O-methylcytidine-3'-phosphate
  modified_base 18: mod_base = OTHER; note = 2'-O-methyluridine-3'-phosphate
  modified_base 19: mod_base = OTHER; note = 2'-O-methylguanosine-3'-phosphate
  modified_base 20: mod_base = OTHER; note = 2'-O-methylguanosine-3'-phosphate
  modified_base 21: mod_base = OTHER; note 2'-O-methyluridine-3'-phosphate-N-[tris(GalNAc-alkyl)-amido decanoyl)]-4-hydroxyprolinol (Hyp-(GalNAc-alkyl)3)
ggacacattcgagcggctggt

SEQ ID NO: 5000 - RNA, 21 nt, synthetic construct
  source 1..21: mol_type = other RNA
  modified_base 1: mod_base = OTHER; note = 2'-O-methylguanosine-3'- phosphorothioate
  modified_base 2: mod_base = OTHER; note = 2'-O-methylguanosine-3'- phosphorothioate
  modified_base 3: mod_base = OTHER; note = 2'-O-methylcytidine-3'-phosphate
  modified_base 4: mod_base = OTHER; note = 2'-O-methylcytidine-3'-phosphate
  modified_base 5: mod_base = OTHER; note = 2'-O-methyluridine-3'-phosphate
  modified_base 6: mod_base = OTHER; note = 2'-O-methyluridine-3'-phosphate
  modified_base 7: mod_base = OTHER; note = 2'-fluorocytidine-3'-phosphate
  modified_base 8: mod_base = OTHER; note = 2'-O-methylguanosine-3'-phosphate
  modified_base 9: mod_base = OTHER; note = 2'-fluoroguanosine-3'-phosphate
  modified_base 10: mod_base = OTHER; note = 2'-fluoroadenosine-3'-phosphate
  modified_base 11: mod_base = OTHER; note = 2'-fluoroguanosine-3'-phosphate
  modified_base 12: mod_base = OTHER; note = 2'-O-methyluridine-3'-phosphate
  modified_base 13: mod_base = OTHER; note = 2'-O-methylguanosine-3'-phosphate
  modified_base 14: mod_base = OTHER; note = 2'-O-methyladenosine-3'-phosphate
  modified_base 15: mod_base = OTHER; note = 2'-O-methyladenosine-3'-phosphate
  modified_base 16: mod_base = OTHER; note = 2'-O-methylguanosine-3'-phosphate
  modified_base 17: mod_base = OTHER; note = 2'-O-methylcytidine-3'-phosphate
  modified_base 18: mod_base = OTHER; note = 2'-O-methyluridine-3'-phosphate
  modified_base 19: mod_base = OTHER; note = 2'-O-methylguanosine-3'-phosphate
  modified_base 20: mod_base = OTHER; note = 2'-O-methylguanosine-3'-phosphate
  modified_base 21: mod_base = OTHER; note 2'-O-methyluridine-3'-phosphate-N-[tris(GalNAc-alkyl)-amido decanoyl)]-4-hydroxyprolinol (Hyp-(GalNAc-alkyl)3)
ggccttcggagtgaagctggt

SEQ ID NO: 5001 - RNA, 21 nt, synthetic construct
  source 1..21: mol_type = other RNA
  modified_base 1: mod_base = OTHER; note = 2'-O-methylcytidine-3'- phosphorothioate
  modified_base 2: mod_base = OTHER; note = 2'-O-methylguanosine-3'- phosphorothioate
  modified_base 3: mod_base = OTHER; note = 2'-O-methylguanosine-3'-phosphate
  modified_base 4: mod_base = OTHER; note = 2'-O-methyladenosine-3'-phosphate
  modified_base 5: mod_base = OTHER; note = 2'-O-methylguanosine-3'-phosphate
  modified_base 6: mod_base = OTHER; note = 2'-O-methyluridine-3'-phosphate
  modified_base 7: mod_base = OTHER; note = 2'-fluoroguanosine-3'-phosphate
  modified_base 8: mod_base = OTHER; note = 2'-O-methyladenosine-3'-phosphate
  modified_base 9: mod_base = OTHER; note = 2'-fluoroadenosine-3'-phosphate
  modified_base 10: mod_base = OTHER; note = 2'-fluoroguanosine-3'-phosphate
  modified_base 11: mod_base = OTHER; note = 2'-fluorocytidine-3'-phosphate
  modified_base 12: mod_base = OTHER; note = 2'-O-methyluridine-3'-phosphate
  modified_base 13: mod_base = OTHER; note = 2'-O-methylguanosine-3'-phosphate
  modified_base 14: mod_base = OTHER; note = 2'-O-methylguanosine-3'-phosphate
  modified_base 15: mod_base = OTHER; note = 2'-O-methyluridine-3'-phosphate
  modified_base 16: mod_base = OTHER; note = 2'-O-methyladenosine-3'-phosphate
  modified_base 17: mod_base = OTHER; note = 2'-O-methylcytidine-3'-phosphate
  modified_base 18: mod_base = OTHER; note = 2'-O-methylguanosine-3'-phosphate
  modified_base 19: mod_base = OTHER; note = 2'-O-methyladenosine-3'-phosphate
  modified_base 20: mod_base = OTHER; note = 2'-O-methylguanosine-3'-phosphate
  modified_base 21: mod_base = OTHER; note 2'-O-methyluridine-3'-phosphate-N-[tris(GalNAc-alkyl)-amido decanoyl)]-4-hydroxyprolinol (Hyp-(GalNAc-alkyl)3)
cggagtgaagctggtacgagt

SEQ ID NO: 5002 - RNA, 21 nt, synthetic construct
  source 1..21: mol_type = other RNA
  modified_base 1: mod_base = OTHER; note = 2'-O-methyluridine-3'-phosphorothioate
  modified_base 2: mod_base = OTHER; note = 2'-O-methylguanosine-3'- phosphorothioate
  modified_base 3: mod_base = OTHER; note = 2'-O-methyladenosine-3'-phosphate
  modified_base 4: mod_base = OTHER; note = 2'-O-methyladenosine-3'-phosphate
  modified_base 5: mod_base = OTHER; note = 2'-O-methylguanosine-3'-phosphate
  modified_base 6: mod_base = OTHER; note = 2'-O-methylcytidine-3'-phosphate
  modified_base 7: mod_base = OTHER; note = 2'-fluorouridine-3'-phosphate
  modified_base 8: mod_base = OTHER; note = 2'-O-methylguanosine-3'-phosphate
  modified_base 9: mod_base = OTHER; note = 2'-fluoroguanosine-3'-phosphate
  modified_base 10: mod_base = OTHER; note = 2'-fluorouridine-3'-phosphate
  modified_base 11: mod_base = OTHER; note = 2'-fluoroadenosine-3'-phosphate
  modified_base 12: mod_base = OTHER; note = 2'-O-methylcytidine-3'-phosphate
  modified_base 13: mod_base = OTHER; note = 2'-O-methylguanosine-3'-phosphate
  modified_base 14: mod_base = OTHER; note = 2'-O-methyladenosine-3'-phosphate
  modified_base 15: mod_base = OTHER; note = 2'-O-methylguanosine-3'-phosphate
  modified_base 16: mod_base = OTHER; note = 2'-O-methylguanosine-3'-phosphate
  modified_base 17: mod_base = OTHER; note = 2'-O-methyluridine-3'-phosphate
  modified_base 18: mod_base = OTHER; note = 2'-O-methylguanosine-3'-phosphate
  modified_base 19: mod_base = OTHER; note = 2'-O-methylcytidine-3'-phosphate
  modified_base 20: mod_base = OTHER; note = 2'-O-methyladenosine-3'-phosphate
  modified_base 21: mod_base = OTHER; note 2'-O-methyluridine-3'-phosphate-N-[tris(GalNAc-alkyl)-amido decanoyl)]-4-hydroxyprolinol (Hyp-(GalNAc-alkyl)3)
tgaagctggtacgaggtgcat

SEQ ID NO: 5003 - RNA, 21 nt, synthetic construct
  source 1..21: mol_type = other RNA
  modified_base 1: mod_base = OTHER; note = 2'-O-methylcytidine-3'- phosphorothioate
  modified_base 2: mod_base = OTHER; note = 2'-O-methyluridine-3'-phosphorothioate
  modified_base 3: mod_base = OTHER; note = 2'-O-methylguanosine-3'-phosphate
  modified_base 4: mod_base = OTHER; note = 2'-O-methylguanosine-3'-phosphate
  modified_base 5: mod_base = OTHER; note = 2'-O-methyluridine-3'-phosphate
  modified_base 6: mod_base = OTHER; note = 2'-O-methyladenosine-3'-phosphate
  modified_base 7: mod_base = OTHER; note = 2'-fluorocytidine-3'-phosphate
  modified_base 8: mod_base = OTHER; note = 2'-O-methylguanosine-3'-phosphate
  modified_base 9: mod_base = OTHER; note = 2'-fluoroadenosine-3'-phosphate
  modified_base 10: mod_base = OTHER; note = 2'-fluoroguanosine-3'-phosphate
  modified_base 11: mod_base = OTHER; note = 2'-fluoroguanosine-3'-phosphate
  modified_base 12: mod_base = OTHER; note = 2'-O-methyluridine-3'-phosphate
  modified_base 13: mod_base = OTHER; note = 2'-O-methylguanosine-3'-phosphate
  modified_base 14: mod_base = OTHER; note = 2'-O-methylcytidine-3'-phosphate
  modified_base 15: mod_base = OTHER; note = 2'-O-methyladenosine-3'-phosphate
  modified_base 16: mod_base = OTHER; note = 2'-O-methyluridine-3'-phosphate
  modified_base 17: mod_base = OTHER; note = 2'-O-methyladenosine-3'-phosphate
  modified_base 18: mod_base = OTHER; note = 2'-O-methyluridine-3'-phosphate
  modified_base 19: mod_base = OTHER; note = 2'-O-methylcytidine-3'-phosphate
  modified_base 20: mod_base = OTHER; note = 2'-O-methyluridine-3'-phosphate
  modified_base 21: mod_base = OTHER; note 2'-O-methyluridine-3'-phosphate-N-[tris(GalNAc-alkyl)-amido decanoyl)]-4-hydroxyprolinol (Hyp-(GalNAc-alkyl)3)
ctggtacgaggtgcatatctt

SEQ ID NO: 5004 - RNA, 21 nt, synthetic construct
  source 1..21: mol_type = other RNA
  modified_base 1: mod_base = OTHER; note = 2'-O-methylguanosine-3'- phosphorothioate
  modified_base 2: mod_base = OTHER; note = 2'-O-methyladenosine-3'- phosphorothioate
  modified_base 3: mod_base = OTHER; note = 2'-O-methylguanosine-3'-phosphate
  modified_base 4: mod_base = OTHER; note = 2'-O-methylguanosine-3'-phosphate
  modified_base 5: mod_base = OTHER; note = 2'-O-methyluridine-3'-phosphate
  modified_base 6: mod_base = OTHER; note = 2'-O-methylguanosine-3'-phosphate
  modified_base 7: mod_base = OTHER; note = 2'-fluorocytidine-3'-phosphate
  modified_base 8: mod_base = OTHER; note = 2'-O-methyladenosine-3'-phosphate
  modified_base 9: mod_base = OTHER; note = 2'-fluorouridine-3'-phosphate
  modified_base 10: mod_base = OTHER; note = 2'-fluoroadenosine-3'-phosphate
  modified_base 11: mod_base = OTHER; note = 2'-fluorouridine-3'-phosphate
  modified_base 12: mod_base = OTHER; note = 2'-O-methylcytidine-3'-phosphate
  modified_base 13: mod_base = OTHER; note = 2'-O-methyluridine-3'-phosphate
  modified_base 14: mod_base = OTHER; note = 2'-O-methylguanosine-3'-phosphate
  modified_base 15: mod_base = OTHER; note = 2'-O-methylguanosine-3'-phosphate
  modified_base 16: mod_base = OTHER; note = 2'-O-methyladenosine-3'-phosphate
  modified_base 17: mod_base = OTHER; note = 2'-O-methylcytidine-3'-phosphate
  modified_base 18: mod_base = OTHER; note = 2'-O-methyladenosine-3'-phosphate
  modified_base 19: mod_base = OTHER; note = 2'-O-methyladenosine-3'-phosphate
  modified_base 20: mod_base = OTHER; note = 2'-O-methylguanosine-3'-phosphate
  modified_base 21: mod_base = OTHER; note 2'-O-methyluridine-3'-phosphate-N-[tris(GalNAc-alkyl)-amido decanoyl)]-4-hydroxyprolinol (Hyp-(GalNAc-alkyl)3)
gaggtgcatatctggacaagt

SEQ ID NO: 5005 - RNA, 21 nt, synthetic construct
  source 1..21: mol_type = other RNA
  modified_base 1: mod_base = OTHER; note = 2'-O-methylcytidine-3'- phosphorothioate
  modified_base 2: mod_base = OTHER; note = 2'-O-methyladenosine-3'- phosphorothioate
  modified_base 3: mod_base = OTHER; note = 2'-O-methyluridine-3'-phosphate
  modified_base 4: mod_base = OTHER; note = 2'-O-methyladenosine-3'-phosphate
  modified_base 5: mod_base = OTHER; note = 2'-O-methyluridine-3'-phosphate
  modified_base 6: mod_base = OTHER; note = 2'-O-methylcytidine-3'-phosphate
  modified_base 7: mod_base = OTHER; note = 2'-fluorouridine-3'-phosphate
  modified_base 8: mod_base = OTHER; note = 2'-O-methylguanosine-3'-phosphate
  modified_base 9: mod_base = OTHER; note = 2'-fluoroguanosine-3'-phosphate
  modified_base 10: mod_base = OTHER; note = 2'-fluoroadenosine-3'-phosphate
  modified_base 11: mod_base = OTHER; note = 2'-fluorocytidine-3'-phosphate
  modified_base 12: mod_base = OTHER; note = 2'-O-methyladenosine-3'-phosphate
  modified_base 13: mod_base = OTHER; note = 2'-O-methyladenosine-3'-phosphate
  modified_base 14: mod_base = OTHER; note = 2'-O-methylguanosine-3'-phosphate
  modified_base 15: mod_base = OTHER; note = 2'-O-methylguanosine-3'-phosphate
  modified_base 16: mod_base = OTHER; note = 2'-O-methyladenosine-3'-phosphate
  modified_base 17: mod_base = OTHER; note = 2'-O-methylguanosine-3'-phosphate
  modified_base 18: mod_base = OTHER; note = 2'-O-methyladenosine-3'-phosphate
  modified_base 19: mod_base = OTHER; note = 2'-O-methylguanosine-3'-phosphate
  modified_base 20: mod_base = OTHER; note = 2'-O-methyladenosine-3'-phosphate
  modified_base 21: mod_base = OTHER; note 2'-O-methyluridine-3'-phosphate-N-[tris(GalNAc-alkyl)-amido decanoyl)]-4-hydroxyprolinol (Hyp-(GalNAc-alkyl)3)
catatctggacaaggagagat

SEQ ID NO: 5006 - RNA, 21 nt, synthetic construct
  source 1..21: mol_type = other RNA
  modified_base 1: mod_base = OTHER; note = 2'-O-methylcytidine-3'- phosphorothioate
  modified_base 2: mod_base = OTHER; note = 2'-O-methyluridine-3'-phosphorothioate
  modified_base 3: mod_base = OTHER; note = 2'-O-methylguanosine-3'-phosphate
  modified_base 4: mod_base = OTHER; note = 2'-O-methylguanosine-3'-phosphate
  modified_base 5: mod_base = OTHER; note = 2'-O-methyladenosine-3'-phosphate
  modified_base 6: mod_base = OTHER; note = 2'-O-methylcytidine-3'-phosphate
  modified_base 7: mod_base = OTHER; note = 2'-fluoroadenosine-3'-phosphate
  modified_base 8: mod_base = OTHER; note = 2'-O-methyladenosine-3'-phosphate
  modified_base 9: mod_base = OTHER; note = 2'-fluoroguanosine-3'-phosphate
  modified_base 10: mod_base = OTHER; note = 2'-fluoroguanosine-3'-phosphate
  modified_base 11: mod_base = OTHER; note = 2'-fluoroadenosine-3'-phosphate
  modified_base 12: mod_base = OTHER; note = 2'-O-methylguanosine-3'-phosphate
  modified_base 13: mod_base = OTHER; note = 2'-O-methyladenosine-3'-phosphate
  modified_base 14: mod_base = OTHER; note = 2'-O-methylguanosine-3'-phosphate
  modified_base 15: mod_base = OTHER; note = 2'-O-methyladenosine-3'-phosphate
  modified_base 16: mod_base = OTHER; note = 2'-O-methylguanosine-3'-phosphate
  modified_base 17: mod_base = OTHER; note = 2'-O-methylcytidine-3'-phosphate
  modified_base 18: mod_base = OTHER; note = 2'-O-methylguanosine-3'-phosphate
  modified_base 19: mod_base = OTHER; note = 2'-O-methylguanosine-3'-phosphate
  modified_base 20: mod_base = OTHER; note = 2'-O-methyluridine-3'-phosphate
  modified_base 21: mod_base = OTHER; note 2'-O-methyluridine-3'-phosphate-N-[tris(GalNAc-alkyl)-amido decanoyl)]-4-hydroxyprolinol (Hyp-(GalNAc-alkyl)3)
ctggacaaggagagagcggtt

SEQ ID NO: 5007 - RNA, 21 nt, synthetic construct
  source 1..21: mol_type = other RNA
  modified_base 1: mod_base = OTHER; note = 2'-O-methylguanosine-3'- phosphorothioate
  modified_base 2: mod_base = OTHER; note = 2'-O-methylcytidine-3'- phosphorothioate
  modified_base 3: mod_base = OTHER; note = 2'-O-methylcytidine-3'-phosphate
  modified_base 4: mod_base = OTHER; note = 2'-O-methylcytidine-3'-phosphate
  modified_base 5: mod_base = OTHER; note = 2'-O-methyladenosine-3'-phosphate
  modified_base 6: mod_base = OTHER; note = 2'-O-methylguanosine-3'-phosphate
  modified_base 7: mod_base = OTHER; note = 2'-fluorocytidine-3'-phosphate
  modified_base 8: mod_base = OTHER; note = 2'-O-methyluridine-3'-phosphate
  modified_base 9: mod_base = OTHER; note = 2'-fluorocytidine-3'-phosphate
  modified_base 10: mod_base = OTHER; note = 2'-fluorocytidine-3'-phosphate
  modified_base 11: mod_base = OTHER; note = 2'-fluoroadenosine-3'-phosphate
  modified_base 12: mod_base = OTHER; note = 2'-O-methyluridine-3'-phosphate
  modified_base 13: mod_base = OTHER; note = 2'-O-methylguanosine-3'-phosphate
  modified_base 14: mod_base = OTHER; note = 2'-O-methylguanosine-3'-phosphate
  modified_base 15: mod_base = OTHER; note = 2'-O-methylguanosine-3'-phosphate
  modified_base 16: mod_base = OTHER; note = 2'-O-methyladenosine-3'-phosphate
  modified_base 17: mod_base = OTHER; note = 2'-O-methyluridine-3'-phosphate
  modified_base 18: mod_base = OTHER; note = 2'-O-methylguanosine-3'-phosphate
  modified_base 19: mod_base = OTHER; note = 2'-O-methylguanosine-3'-phosphate
  modified_base 20: mod_base = OTHER; note = 2'-O-methyladenosine-3'-phosphate
  modified_base 21: mod_base = OTHER; note 2'-O-methyluridine-3'-phosphate-N-[tris(GalNAc-alkyl)-amido decanoyl)]-4-hydroxyprolinol (Hyp-(GalNAc-alkyl)3)
gcccagctccatgggatggat

SEQ ID NO: 5008 - RNA, 21 nt, synthetic construct
  source 1..21: mol_type = other RNA
  modified_base 1: mod_base = OTHER; note = 2'-O-methylguanosine-3'- phosphorothioate
  modified_base 2: mod_base = OTHER; note = 2'-O-methylcytidine-3'- phosphorothioate
  modified_base 3: mod_base = OTHER; note = 2'-O-methyluridine-3'-phosphate
  modified_base 4: mod_base = OTHER; note = 2'-O-methylcytidine-3'-phosphate
  modified_base 5: mod_base = OTHER; note = 2'-O-methylcytidine-3'-phosphate
  modified_base 6: mod_base = OTHER; note = 2'-O-methyladenosine-3'-phosphate
  modified_base 7: mod_base = OTHER; note = 2'-fluorouridine-3'-phosphate
  modified_base 8: mod_base = OTHER; note = 2'-O-methylguanosine-3'-phosphate
  modified_base 9: mod_base = OTHER; note = 2'-fluoroguanosine-3'-phosphate
  modified_base 10: mod_base = OTHER; note = 2'-fluoroguanosine-3'-phosphate
  modified_base 11: mod_base = OTHER; note = 2'-fluoroadenosine-3'-phosphate
  modified_base 12: mod_base = OTHER; note = 2'-O-methyluridine-3'-phosphate
  modified_base 13: mod_base = OTHER; note = 2'-O-methylguanosine-3'-phosphate
  modified_base 14: mod_base = OTHER; note = 2'-O-methylguanosine-3'-phosphate
  modified_base 15: mod_base = OTHER; note = 2'-O-methyladenosine-3'-phosphate
  modified_base 16: mod_base = OTHER; note = 2'-O-methyladenosine-3'-phosphate
  modified_base 17: mod_base = OTHER; note = 2'-O-methylguanosine-3'-phosphate
  modified_base 18: mod_base = OTHER; note = 2'-O-methyladenosine-3'-phosphate
  modified_base 19: mod_base = OTHER; note = 2'-O-methylcytidine-3'-phosphate
  modified_base 20: mod_base = OTHER; note = 2'-O-methylcytidine-3'-phosphate
  modified_base 21: mod_base = OTHER; note 2'-O-methyluridine-3'-phosphate-N-[tris(GalNAc-alkyl)-amido decanoyl)]-4-hydroxyprolinol (Hyp-(GalNAc-alkyl)3)
gctccatgggatggaagacct

SEQ ID NO: 5009 - RNA, 21 nt, synthetic construct
  source 1..21: mol_type = other RNA
  modified_base 1: mod_base = OTHER; note = 2'-O-methylcytidine-3'- phosphorothioate
  modified_base 2: mod_base = OTHER; note = 2'-O-methyluridine-3'-phosphorothioate
  modified_base 3: mod_base = OTHER; note = 2'-O-methylcytidine-3'-phosphate
  modified_base 4: mod_base = OTHER; note = 2'-O-methyladenosine-3'-phosphate
  modified_base 5: mod_base = OTHER; note = 2'-O-methylguanosine-3'-phosphate
  modified_base 6: mod_base = OTHER; note = 2'-O-methylcytidine-3'-phosphate
  modified_base 7: mod_base = OTHER; note = 2'-fluorocytidine-3'-phosphate
  modified_base 8: mod_base = OTHER; note = 2'-O-methyluridine-3'-phosphate
  modified_base 9: mod_base = OTHER; note = 2'-fluoroguanosine-3'-phosphate
  modified_base 10: mod_base = OTHER; note = 2'-fluoroadenosine-3'-phosphate
  modified_base 11: mod_base = OTHER; note = 2'-fluorocytidine-3'-phosphate
  modified_base 12: mod_base = OTHER; note = 2'-O-methyluridine-3'-phosphate
  modified_base 13: mod_base = OTHER; note = 2'-O-methyladenosine-3'-phosphate
  modified_base 14: mod_base = OTHER; note = 2'-O-methyluridine-3'-phosphate
  modified_base 15: mod_base = OTHER; note = 2'-O-methylguanosine-3'-phosphate
  modified_base 16: mod_base = OTHER; note = 2'-O-methyladenosine-3'-phosphate
  modified_base 17: mod_base = OTHER; note = 2'-O-methylguanosine-3'-phosphate
  modified_base 18: mod_base = OTHER; note = 2'-O-methylguanosine-3'-phosphate
  modified_base 19: mod_base = OTHER; note = 2'-O-methylcytidine-3'-phosphate
  modified_base 20: mod_base = OTHER; note = 2'-O-methylcytidine-3'-phosphate
  modified_base 21: mod_base = OTHER; note 2'-O-methyluridine-3'-phosphate-N-[tris(GalNAc-alkyl)-amido decanoyl)]-4-hydroxyprolinol (Hyp-(GalNAc-alkyl)3)
ctcagcctgactatgaggcct

SEQ ID NO: 5010 - RNA, 21 nt, synthetic construct
  source 1..21: mol_type = other RNA
  modified_base 1: mod_base = OTHER; note = 2'-O-methylguanosine-3'- phosphorothioate
  modified_base 2: mod_base = OTHER; note = 2'-O-methyladenosine-3'- phosphorothioate
  modified_base 3: mod_base = OTHER; note = 2'-O-methylcytidine-3'-phosphate
  modified_base 4: mod_base = OTHER; note = 2'-O-methyluridine-3'-phosphate
  modified_base 5: mod_base = OTHER; note = 2'-O-methyladenosine-3'-phosphate
  modified_base 6: mod_base = OTHER; note = 2'-O-methyluridine-3'-phosphate
  modified_base 7: mod_base = OTHER; note = 2'-fluoroguanosine-3'-phosphate
  modified_base 8: mod_base = OTHER; note = 2'-O-methyladenosine-3'-phosphate
  modified_base 9: mod_base = OTHER; note = 2'-fluoroguanosine-3'-phosphate
  modified_base 10: mod_base = OTHER; note = 2'-fluoroguanosine-3'-phosphate
  modified_base 11: mod_base = OTHER; note = 2'-fluorocytidine-3'-phosphate
  modified_base 12: mod_base = OTHER; note = 2'-O-methylcytidine-3'-phosphate
  modified_base 13: mod_base = OTHER; note = 2'-O-methyladenosine-3'-phosphate
  modified_base 14: mod_base = OTHER; note = 2'-O-methylcytidine-3'-phosphate
  modified_base 15: mod_base = OTHER; note = 2'-O-methylcytidine-3'-phosphate
  modified_base 16: mod_base = OTHER; note = 2'-O-methyladenosine-3'-phosphate
  modified_base 17: mod_base = OTHER; note = 2'-O-methylguanosine-3'-phosphate
  modified_base 18: mod_base = OTHER; note = 2'-O-methyluridine-3'-phosphate
  modified_base 19: mod_base = OTHER; note = 2'-O-methylcytidine-3'-phosphate
  modified_base 20: mod_base = OTHER; note = 2'-O-methyladenosine-3'-phosphate
  modified_base 21: mod_base = OTHER; note 2'-O-methyluridine-3'-phosphate-N-[tris(GalNAc-alkyl)-amido decanoyl)]-4-hydroxyprolinol (Hyp-(GalNAc-alkyl)3)
gactatgaggccaccagtcat

SEQ ID NO: 5011 - RNA, 21 nt, synthetic construct
  source 1..21: mol_type = other RNA
  modified_base 1: mod_base = OTHER; note = 2'-O-methylguanosine-3'- phosphorothioate
  modified_base 2: mod_base = OTHER; note = 2'-O-methyladenosine-3'- phosphorothioate
  modified_base 3: mod_base = OTHER; note = 2'-O-methylguanosine-3'-phosphate
  modified_base 4: mod_base = OTHER; note = 2'-O-methylguanosine-3'-phosphate
  modified_base 5: mod_base = OTHER; note = 2'-O-methylcytidine-3'-phosphate
  modified_base 6: mod_base = OTHER; note = 2'-O-methylcytidine-3'-phosphate
  modified_base 7: mod_base = OTHER; note = 2'-fluoroadenosine-3'-phosphate
  modified_base 8: mod_base = OTHER; note = 2'-O-methylcytidine-3'-phosphate
  modified_base 9: mod_base = OTHER; note = 2'-fluorocytidine-3'-phosphate
  modified_base 10: mod_base = OTHER; note = 2'-fluoroadenosine-3'-phosphate
  modified_base 11: mod_base = OTHER; note = 2'-fluoroguanosine-3'-phosphate
  modified_base 12: mod_base = OTHER; note = 2'-O-methyluridine-3'-phosphate
  modified_base 13: mod_base = OTHER; note = 2'-O-methylcytidine-3'-phosphate
  modified_base 14: mod_base = OTHER; note = 2'-O-methyladenosine-3'-phosphate
  modified_base 15: mod_base = OTHER; note = 2'-O-methylguanosine-3'-phosphate
  modified_base 16: mod_base = OTHER; note = 2'-O-methyladenosine-3'-phosphate
  modified_base 17: mod_base = OTHER; note = 2'-O-methylguanosine-3'-phosphate
  modified_base 18: mod_base = OTHER; note = 2'-O-methyluridine-3'-phosphate
  modified_base 19: mod_base = OTHER; note = 2'-O-methyluridine-3'-phosphate
  modified_base 20: mod_base = OTHER; note = 2'-O-methyladenosine-3'-phosphate
  modified_base 21: mod_base = OTHER; note 2'-O-methyluridine-3'-phosphate-N-[tris(GalNAc-alkyl)-amido decanoyl)]-4-hydroxyprolinol (Hyp-(GalNAc-alkyl)3)
gaggccaccagtcagagttat

SEQ ID NO: 5012 - RNA, 21 nt, synthetic construct
  source 1..21: mol_type = other RNA
  modified_base 1: mod_base = OTHER; note = 2'-O-methyladenosine-3'- phosphorothioate
  modified_base 2: mod_base = OTHER; note = 2'-O-methylcytidine-3'- phosphorothioate
  modified_base 3: mod_base = OTHER; note = 2'-O-methylcytidine-3'-phosphate
  modified_base 4: mod_base = OTHER; note = 2'-O-methyladenosine-3'-phosphate
  modified_base 5: mod_base = OTHER; note = 2'-O-methylguanosine-3'-phosphate
  modified_base 6: mod_base = OTHER; note = 2'-O-methyluridine-3'-phosphate
  modified_base 7: mod_base = OTHER; note = 2'-fluorocytidine-3'-phosphate
  modified_base 8: mod_base = OTHER; note = 2'-O-methyladenosine-3'-phosphate
  modified_base 9: mod_base = OTHER; note = 2'-fluoroguanosine-3'-phosphate
  modified_base 10: mod_base = OTHER; note = 2'-fluoroadenosine-3'-phosphate
  modified_base 11: mod_base = OTHER; note = 2'-fluoroguanosine-3'-phosphate
  modified_base 12: mod_base = OTHER; note = 2'-O-methyluridine-3'-phosphate
  modified_base 13: mod_base = OTHER; note = 2'-O-methyluridine-3'-phosphate
  modified_base 14: mod_base = OTHER; note = 2'-O-methyladenosine-3'-phosphate
  modified_base 15: mod_base = OTHER; note = 2'-O-methylcytidine-3'-phosphate
  modified_base 16: mod_base = OTHER; note = 2'-O-methyladenosine-3'-phosphate
  modified_base 17: mod_base = OTHER; note = 2'-O-methylguanosine-3'-phosphate
  modified_base 18: mod_base = OTHER; note = 2'-O-methylcytidine-3'-phosphate
  modified_base 19: mod_base = OTHER; note = 2'-O-methylcytidine-3'-phosphate
  modified_base 20: mod_base = OTHER; note = 2'-O-methylguanosine-3'-phosphate
  modified_base 21: mod_base = OTHER; note 2'-O-methyluridine-3'-phosphate-N-[tris(GalNAc-alkyl)-amido decanoyl)]-4-hydroxyprolinol (Hyp-(GalNAc-alkyl)3)
accagtcagagttacagccgt

SEQ ID NO: 5013 - RNA, 21 nt, synthetic construct
  source 1..21: mol_type = other RNA
  modified_base 1: mod_base = OTHER; note = 2'-O-methyluridine-3'-phosphorothioate
  modified_base 2: mod_base = OTHER; note = 2'-O-methylcytidine-3'- phosphorothioate
  modified_base 3: mod_base = OTHER; note = 2'-O-methyladenosine-3'-phosphate
  modified_base 4: mod_base = OTHER; note = 2'-O-methylguanosine-3'-phosphate
  modified_base 5: mod_base = OTHER; note = 2'-O-methyladenosine-3'-phosphate
  modified_base 6: mod_base = OTHER; note = 2'-O-methylguanosine-3'-phosphate
  modified_base 7: mod_base = OTHER; note = 2'-fluorouridine-3'-phosphate
  modified_base 8: mod_base = OTHER; note = 2'-O-methyluridine-3'-phosphate
  modified_base 9: mod_base = OTHER; note = 2'-fluoroadenosine-3'-phosphate
  modified_base 10: mod_base = OTHER; note = 2'-fluorocytidine-3'-phosphate
  modified_base 11: mod_base = OTHER; note = 2'-fluoroadenosine-3'-phosphate
  modified_base 12: mod_base = OTHER; note = 2'-O-methylguanosine-3'-phosphate
  modified_base 13: mod_base = OTHER; note = 2'-O-methylcytidine-3'-phosphate
  modified_base 14: mod_base = OTHER; note = 2'-O-methylcytidine-3'-phosphate
  modified_base 15: mod_base = OTHER; note = 2'-O-methylguanosine-3'-phosphate
  modified_base 16: mod_base = OTHER; note = 2'-O-methylcytidine-3'-phosphate
  modified_base 17: mod_base = OTHER; note = 2'-O-methyluridine-3'-phosphate
  modified_base 18: mod_base = OTHER; note = 2'-O-methylguanosine-3'-phosphate
  modified_base 19: mod_base = OTHER; note = 2'-O-methylcytidine-3'-phosphate
  modified_base 20: mod_base = OTHER; note = 2'-O-methylcytidine-3'-phosphate
  modified_base 21: mod_base = OTHER; note 2'-O-methyluridine-3'-phosphate-N-[tris(GalNAc-alkyl)-amido decanoyl)]-4-hydroxyprolinol (Hyp-(GalNAc-alkyl)3)
tcagagttacagccgctgcct

SEQ ID NO: 5014 - RNA, 21 nt, synthetic construct
  source 1..21: mol_type = other RNA
  modified_base 1: mod_base = OTHER; note = 2'-O-methylcytidine-3'- phosphorothioate
  modified_base 2: mod_base = OTHER; note = 2'-O-methyladenosine-3'- phosphorothioate
  modified_base 3: mod_base = OTHER; note = 2'-O-methylguanosine-3'-phosphate
  modified_base 4: mod_base = OTHER; note = 2'-O-methylcytidine-3'-phosphate
  modified_base 5: mod_base = OTHER; note = 2'-O-methylcytidine-3'-phosphate
  modified_base 6: mod_base = OTHER; note = 2'-O-methylguanosine-3'-phosphate
  modified_base 7: mod_base = OTHER; note = 2'-fluorocytidine-3'-phosphate
  modified_base 8: mod_base = OTHER; note = 2'-O-methyluridine-3'-phosphate
  modified_base 9: mod_base = OTHER; note = 2'-fluoroguanosine-3'-phosphate
  modified_base 10: mod_base = OTHER; note = 2'-fluorocytidine-3'-phosphate
  modified_base 11: mod_base = OTHER; note = 2'-fluorocytidine-3'-phosphate
  modified_base 12: mod_base = OTHER; note = 2'-O-methyluridine-3'-phosphate
  modified_base 13: mod_base = OTHER; note = 2'-O-methylguanosine-3'-phosphate
  modified_base 14: mod_base = OTHER; note = 2'-O-methylguanosine-3'-phosphate
  modified_base 15: mod_base = OTHER; note = 2'-O-methyladenosine-3'-phosphate
  modified_base 16: mod_base = OTHER; note = 2'-O-methyladenosine-3'-phosphate
  modified_base 17: mod_base = OTHER; note = 2'-O-methylcytidine-3'-phosphate
  modified_base 18: mod_base = OTHER; note = 2'-O-methyluridine-3'-phosphate
  modified_base 19: mod_base = OTHER; note = 2'-O-methylguanosine-3'-phosphate
  modified_base 20: mod_base = OTHER; note = 2'-O-methyladenosine-3'-phosphate
  modified_base 21: mod_base = OTHER; note 2'-O-methyluridine-3'-phosphate-N-[tris(GalNAc-alkyl)-amido decanoyl)]-4-hydroxyprolinol (Hyp-(GalNAc-alkyl)3)
cagccgctgcctggaactgat

SEQ ID NO: 5015 - RNA, 21 nt, synthetic construct
  source 1..21: mol_type = other RNA
  modified_base 1: mod_base = OTHER; note = 2'-O-methylguanosine-3'- phosphorothioate
  modified_base 2: mod_base = OTHER; note = 2'-O-methylcytidine-3'- phosphorothioate
  modified_base 3: mod_base = OTHER; note = 2'-O-methyluridine-3'-phosphate
  modified_base 4: mod_base = OTHER; note = 2'-O-methylguanosine-3'-phosphate
  modified_base 5: mod_base = OTHER; note = 2'-O-methylcytidine-3'-phosphate
  modified_base 6: mod_base = OTHER; note = 2'-O-methylcytidine-3'-phosphate
  modified_base 7: mod_base = OTHER; note = 2'-fluorouridine-3'-phosphate
  modified_base 8: mod_base = OTHER; note = 2'-O-methylguanosine-3'-phosphate
  modified_base 9: mod_base = OTHER; note = 2'-fluoroguanosine-3'-phosphate
  modified_base 10: mod_base = OTHER; note = 2'-fluoroadenosine-3'-phosphate
  modified_base 11: mod_base = OTHER; note = 2'-fluoroadenosine-3'-phosphate
  modified_base 12: mod_base = OTHER; note = 2'-O-methylcytidine-3'-phosphate
  modified_base 13: mod_base = OTHER; note = 2'-O-methyluridine-3'-phosphate
  modified_base 14: mod_base = OTHER; note = 2'-O-methylguanosine-3'-phosphate
  modified_base 15: mod_base = OTHER; note = 2'-O-methyladenosine-3'-phosphate
  modified_base 16: mod_base = OTHER; note = 2'-O-methyluridine-3'-phosphate
  modified_base 17: mod_base = OTHER; note = 2'-O-methylguanosine-3'-phosphate
  modified_base 18: mod_base = OTHER; note = 2'-O-methylcytidine-3'-phosphate
  modified_base 19: mod_base = OTHER; note = 2'-O-methyluridine-3'-phosphate
  modified_base 20: mod_base = OTHER; note = 2'-O-methylguanosine-3'-phosphate
  modified_base 21: mod_base = OTHER; note 2'-O-methyluridine-3'-phosphate-N-[tris(GalNAc-alkyl)-amido decanoyl)]-4-hydroxyprolinol (Hyp-(GalNAc-alkyl)3)
gctgcctggaactgatgctgt

SEQ ID NO: 5016 - RNA, 21 nt, synthetic construct
  source 1..21: mol_type = other RNA
  modified_base 1: mod_base = OTHER; note = 2'-O-methylguanosine-3'- phosphorothioate
  modified_base 2: mod_base = OTHER; note = 2'-O-methylguanosine-3'- phosphorothioate
  modified_base 3: mod_base = OTHER; note = 2'-O-methyladenosine-3'-phosphate
  modified_base 4: mod_base = OTHER; note = 2'-O-methyladenosine-3'-phosphate
  modified_base 5: mod_base = OTHER; note = 2'-O-methylcytidine-3'-phosphate
  modified_base 6: mod_base = OTHER; note = 2'-O-methyluridine-3'-phosphate
  modified_base 7: mod_base = OTHER; note = 2'-fluoroguanosine-3'-phosphate
  modified_base 8: mod_base = OTHER; note = 2'-O-methyladenosine-3'-phosphate
  modified_base 9: mod_base = OTHER; note = 2'-fluorouridine-3'-phosphate
  modified_base 10: mod_base = OTHER; note = 2'-fluoroguanosine-3'-phosphate
  modified_base 11: mod_base = OTHER; note = 2'-fluorocytidine-3'-phosphate
  modified_base 12: mod_base = OTHER; note = 2'-O-methyluridine-3'-phosphate
  modified_base 13: mod_base = OTHER; note = 2'-O-methylguanosine-3'-phosphate
  modified_base 14: mod_base = OTHER; note = 2'-O-methyladenosine-3'-phosphate
  modified_base 15: mod_base = OTHER; note = 2'-O-methylcytidine-3'-phosphate
  modified_base 16: mod_base = OTHER; note = 2'-O-methylguanosine-3'-phosphate
  modified_base 17: mod_base = OTHER; note = 2'-O-methylcytidine-3'-phosphate
  modified_base 18: mod_base = OTHER; note = 2'-O-methyladenosine-3'-phosphate
  modified_base 19: mod_base = OTHER; note = 2'-O-methylcytidine-3'-phosphate
  modified_base 20: mod_base = OTHER; note = 2'-O-methylguanosine-3'-phosphate
  modified_base 21: mod_base = OTHER; note 2'-O-methyluridine-3'-phosphate-N-[tris(GalNAc-alkyl)-amido decanoyl)]-4-hydroxyprolinol (Hyp-(GalNAc-alkyl)3)
ggaactgatgctgacgcacgt

SEQ ID NO: 5017 - RNA, 21 nt, synthetic construct
  source 1..21: mol_type = other RNA
  modified_base 1: mod_base = OTHER; note = 2'-O-methyluridine-3'-phosphorothioate
  modified_base 2: mod_base = OTHER; note = 2'-O-methylguanosine-3'- phosphorothioate
  modified_base 3: mod_base = OTHER; note = 2'-O-methyladenosine-3'-phosphate
  modified_base 4: mod_base = OTHER; note = 2'-O-methyluridine-3'-phosphate
  modified_base 5: mod_base = OTHER; note = 2'-O-methylguanosine-3'-phosphate
  modified_base 6: mod_base = OTHER; note = 2'-O-methylcytidine-3'-phosphate
  modified_base 7: mod_base = OTHER; note = 2'-fluorouridine-3'-phosphate
  modified_base 8: mod_base = OTHER; note = 2'-O-methylguanosine-3'-phosphate
  modified_base 9: mod_base = OTHER; note = 2'-fluoroadenosine-3'-phosphate
  modified_base 10: mod_base = OTHER; note = 2'-fluorocytidine-3'-phosphate
  modified_base 11: mod_base = OTHER; note = 2'-fluoroguanosine-3'-phosphate
  modified_base 12: mod_base = OTHER; note = 2'-O-methylcytidine-3'-phosphate
  modified_base 13: mod_base = OTHER; note = 2'-O-methyladenosine-3'-phosphate
  modified_base 14: mod_base = OTHER; note = 2'-O-methylcytidine-3'-phosphate
  modified_base 15: mod_base = OTHER; note = 2'-O-methylguanosine-3'-phosphate
  modified_base 16: mod_base = OTHER; note = 2'-O-methyluridine-3'-phosphate
  modified_base 17: mod_base = OTHER; note = 2'-O-methylguanosine-3'-phosphate
  modified_base 18: mod_base = OTHER; note = 2'-O-methylguanosine-3'-phosphate
  modified_base 19: mod_base = OTHER; note = 2'-O-methylcytidine-3'-phosphate
  modified_base 20: mod_base = OTHER; note = 2'-O-methylcytidine-3'-phosphate
  modified_base 21: mod_base = OTHER; note 2'-O-methyluridine-3'-phosphate-N-[tris(GalNAc-alkyl)-amido decanoyl)]-4-hydroxyprolinol (Hyp-(GalNAc-alkyl)3)
tgatgctgacgcacgtggcct

SEQ ID NO: 5018 - RNA, 21 nt, synthetic construct
  source 1..21: mol_type = other RNA
  modified_base 1: mod_base = OTHER; note = 2'-O-methylcytidine-3'- phosphorothioate
  modified_base 2: mod_base = OTHER; note = 2'-O-methyladenosine-3'- phosphorothioate
  modified_base 3: mod_base = OTHER; note = 2'-O-methyluridine-3'-phosphate
  modified_base 4: mod_base = OTHER; note = 2'-O-methylguanosine-3'-phosphate
  modified_base 5: mod_base = OTHER; note = 2'-O-methyluridine-3'-phosphate
  modified_base 6: mod_base = OTHER; note = 2'-O-methylguanosine-3'-phosphate
  modified_base 7: mod_base = OTHER; note = 2'-fluorocytidine-3'-phosphate
  modified_base 8: mod_base = OTHER; note = 2'-O-methylcytidine-3'-phosphate
  modified_base 9: mod_base = OTHER; note = 2'-fluoroadenosine-3'-phosphate
  modified_base 10: mod_base = OTHER; note = 2'-fluorocytidine-3'-phosphate
  modified_base 11: mod_base = OTHER; note = 2'-fluorocytidine-3'-phosphate
  modified_base 12: mod_base = OTHER; note = 2'-O-methyluridine-3'-phosphate
  modified_base 13: mod_base = OTHER; note = 2'-O-methylcytidine-3'-phosphate
  modified_base 14: mod_base = OTHER; note = 2'-O-methyladenosine-3'-phosphate
  modified_base 15: mod_base = OTHER; note = 2'-O-methyluridine-3'-phosphate
  modified_base 16: mod_base = OTHER; note = 2'-O-methylguanosine-3'-phosphate
  modified_base 17: mod_base = OTHER; note = 2'-O-methylguanosine-3'-phosphate
  modified_base 18: mod_base = OTHER; note = 2'-O-methyluridine-3'-phosphate
  modified_base 19: mod_base = OTHER; note = 2'-O-methylguanosine-3'-phosphate
  modified_base 20: mod_base = OTHER; note = 2'-O-methylguanosine-3'-phosphate
  modified_base 21: mod_base = OTHER; note 2'-O-methyluridine-3'-phosphate-N-[tris(GalNAc-alkyl)-amido decanoyl)]-4-hydroxyprolinol (Hyp-(GalNAc-alkyl)3)
catgtgccacctcatggtggt

SEQ ID NO: 5019 - RNA, 21 nt, synthetic construct
  source 1..21: mol_type = other RNA
  modified_base 1: mod_base = OTHER; note = 2'-O-methylcytidine-3'- phosphorothioate
  modified_base 2: mod_base = OTHER; note = 2'-O-methyluridine-3'-phosphorothioate
  modified_base 3: mod_base = OTHER; note = 2'-O-methylcytidine-3'-phosphate
  modified_base 4: mod_base = OTHER; note = 2'-O-methyladenosine-3'-phosphate
  modified_base 5: mod_base = OTHER; note = 2'-O-methyluridine-3'-phosphate
  modified_base 6: mod_base = OTHER; note = 2'-O-methylguanosine-3'-phosphate
  modified_base 7: mod_base = OTHER; note = 2'-fluoroguanosine-3'-phosphate
  modified_base 8: mod_base = OTHER; note = 2'-O-methyluridine-3'-phosphate
  modified_base 9: mod_base = OTHER; note = 2'-fluoroguanosine-3'-phosphate
  modified_base 10: mod_base = OTHER; note = 2'-fluoroguanosine-3'-phosphate
  modified_base 11: mod_base = OTHER; note = 2'-fluorocytidine-3'-phosphate
  modified_base 12: mod_base = OTHER; note = 2'-O-methyluridine-3'-phosphate
  modified_base 13: mod_base = OTHER; note = 2'-O-methyluridine-3'-phosphate
  modified_base 14: mod_base = OTHER; note = 2'-O-methylcytidine-3'-phosphate
  modified_base 15: mod_base = OTHER; note = 2'-O-methylcytidine-3'-phosphate
  modified_base 16: mod_base = OTHER; note = 2'-O-methylcytidine-3'-phosphate
  modified_base 17: mod_base = OTHER; note = 2'-O-methyladenosine-3'-phosphate
  modified_base 18: mod_base = OTHER; note = 2'-O-methylcytidine-3'-phosphate
  modified_base 19: mod_base = OTHER; note = 2'-O-methyladenosine-3'-phosphate
  modified_base 20: mod_base = OTHER; note = 2'-O-methyladenosine-3'-phosphate
  modified_base 21: mod_base = OTHER; note 2'-O-methyluridine-3'-phosphate-N-[tris(GalNAc-alkyl)-amido decanoyl)]-4-hydroxyprolinol (Hyp-(GalNAc-alkyl)3)
ctcatggtggcttcccacaat

SEQ ID NO: 5020 - RNA, 21 nt, synthetic construct
  source 1..21: mol_type = other RNA
  modified_base 1: mod_base = OTHER; note = 2'-O-methylguanosine-3'- phosphorothioate
  modified_base 2: mod_base = OTHER; note = 2'-O-methylguanosine-3'- phosphorothioate
  modified_base 3: mod_base = OTHER; note = 2'-O-methylcytidine-3'-phosphate
  modified_base 4: mod_base = OTHER; note = 2'-O-methyluridine-3'-phosphate
  modified_base 5: mod_base = OTHER; note = 2'-O-methyluridine-3'-phosphate
  modified_base 6: mod_base = OTHER; note = 2'-O-methylcytidine-3'-phosphate
  modified_base 7: mod_base = OTHER; note = 2'-fluorocytidine-3'-phosphate
  modified_base 8: mod_base = OTHER; note = 2'-O-methylcytidine-3'-phosphate
  modified_base 9: mod_base = OTHER; note = 2'-fluoroadenosine-3'-phosphate
  modified_base 10: mod_base = OTHER; note = 2'-fluorocytidine-3'-phosphate
  modified_base 11: mod_base = OTHER; note = 2'-fluoroadenosine-3'-phosphate
  modified_base 12: mod_base = OTHER; note = 2'-O-methyladenosine-3'-phosphate
  modified_base 13: mod_base = OTHER; note = 2'-O-methyluridine-3'-phosphate
  modified_base 14: mod_base = OTHER; note = 2'-O-methylguanosine-3'-phosphate
  modified_base 15: mod_base = OTHER; note = 2'-O-methyladenosine-3'-phosphate
  modified_base 16: mod_base = OTHER; note = 2'-O-methylguanosine-3'-phosphate
  modified_base 17: mod_base = OTHER; note = 2'-O-methylguanosine-3'-phosphate
  modified_base 18: mod_base = OTHER; note = 2'-O-methyladenosine-3'-phosphate
  modified_base 19: mod_base = OTHER; note = 2'-O-methyladenosine-3'-phosphate
  modified_base 20: mod_base = OTHER; note = 2'-O-methyluridine-3'-phosphate
  modified_base 21: mod_base = OTHER; note 2'-O-methyluridine-3'-phosphate-N-[tris(GalNAc-alkyl)-amido decanoyl)]-4-hydroxyprolinol (Hyp-(GalNAc-alkyl)3)
ggcttcccacaatgaggaatt

SEQ ID NO: 5021 - RNA, 21 nt, synthetic construct
  source 1..21: mol_type = other RNA
  modified_base 1: mod_base = OTHER; note = 2'-O-methylcytidine-3'- phosphorothioate
  modified_base 2: mod_base = OTHER; note = 2'-O-methylcytidine-3'- phosphorothioate
  modified_base 3: mod_base = OTHER; note = 2'-O-methylcytidine-3'-phosphate
  modified_base 4: mod_base = OTHER; note = 2'-O-methyladenosine-3'-phosphate
  modified_base 5: mod_base = OTHER; note = 2'-O-methylcytidine-3'-phosphate
  modified_base 6: mod_base = OTHER; note = 2'-O-methyladenosine-3'-phosphate
  modified_base 7: mod_base = OTHER; note = 2'-fluoroadenosine-3'-phosphate
  modified_base 8: mod_base = OTHER; note = 2'-O-methyluridine-3'-phosphate
  modified_base 9: mod_base = OTHER; note = 2'-fluoroguanosine-3'-phosphate
  modified_base 10: mod_base = OTHER; note = 2'-fluoroadenosine-3'-phosphate
  modified_base 11: mod_base = OTHER; note = 2'-fluoroguanosine-3'-phosphate
  modified_base 12: mod_base = OTHER; note = 2'-O-methylguanosine-3'-phosphate
  modified_base 13: mod_base = OTHER; note = 2'-O-methyladenosine-3'-phosphate
  modified_base 14: mod_base = OTHER; note = 2'-O-methyladenosine-3'-phosphate
  modified_base 15: mod_base = OTHER; note = 2'-O-methyluridine-3'-phosphate
  modified_base 16: mod_base = OTHER; note = 2'-O-methylcytidine-3'-phosphate
  modified_base 17: mod_base = OTHER; note = 2'-O-methyluridine-3'-phosphate
  modified_base 18: mod_base = OTHER; note = 2'-O-methylguanosine-3'-phosphate
  modified_base 19: mod_base = OTHER; note = 2'-O-methyluridine-3'-phosphate
  modified_base 20: mod_base = OTHER; note = 2'-O-methyluridine-3'-phosphate
  modified_base 21: mod_base = OTHER; note 2'-O-methyluridine-3'-phosphate-N-[tris(GalNAc-alkyl)-amido decanoyl)]-4-hydroxyprolinol (Hyp-(GalNAc-alkyl)3)
cccacaatgaggaatctgttt

SEQ ID NO: 5022 - RNA, 21 nt, synthetic construct
  source 1..21: mol_type = other RNA
  modified_base 1: mod_base = OTHER; note = 2'-O-methyladenosine-3'- phosphorothioate
  modified_base 2: mod_base = OTHER; note = 2'-O-methyladenosine-3'- phosphorothioate
  modified_base 3: mod_base = OTHER; note = 2'-O-methyluridine-3'-phosphate
  modified_base 4: mod_base = OTHER; note = 2'-O-methylguanosine-3'-phosphate
  modified_base 5: mod_base = OTHER; note = 2'-O-methyladenosine-3'-phosphate
  modified_base 6: mod_base = OTHER; note = 2'-O-methylguanosine-3'-phosphate
  modified_base 7: mod_base = OTHER; note = 2'-fluoroguanosine-3'-phosphate
  modified_base 8: mod_base = OTHER; note = 2'-O-methyladenosine-3'-phosphate
  modified_base 9: mod_base = OTHER; note = 2'-fluoroadenosine-3'-phosphate
  modified_base 10: mod_base = OTHER; note = 2'-fluorouridine-3'-phosphate
  modified_base 11: mod_base = OTHER; note = 2'-fluorocytidine-3'-phosphate
  modified_base 12: mod_base = OTHER; note = 2'-O-methyluridine-3'-phosphate
  modified_base 13: mod_base = OTHER; note = 2'-O-methylguanosine-3'-phosphate
  modified_base 14: mod_base = OTHER; note = 2'-O-methyluridine-3'-phosphate
  modified_base 15: mod_base = OTHER; note = 2'-O-methyluridine-3'-phosphate
  modified_base 16: mod_base = OTHER; note = 2'-O-methylcytidine-3'-phosphate
  modified_base 17: mod_base = OTHER; note = 2'-O-methylguanosine-3'-phosphate
  modified_base 18: mod_base = OTHER; note = 2'-O-methylcytidine-3'-phosphate
  modified_base 19: mod_base = OTHER; note = 2'-O-methylcytidine-3'-phosphate
  modified_base 20: mod_base = OTHER; note = 2'-O-methyladenosine-3'-phosphate
  modified_base 21: mod_base = OTHER; note 2'-O-methyluridine-3'-phosphate-N-[tris(GalNAc-alkyl)-amido decanoyl)]-4-hydroxyprolinol (Hyp-(GalNAc-alkyl)3)
aatgaggaatctgttcgccat

SEQ ID NO: 5023 - RNA, 21 nt, synthetic construct
  source 1..21: mol_type = other RNA
  modified_base 1: mod_base = OTHER; note = 2'-O-methyluridine-3'-phosphorothioate
  modified_base 2: mod_base = OTHER; note = 2'-O-methylcytidine-3'- phosphorothioate
  modified_base 3: mod_base = OTHER; note = 2'-O-methyluridine-3'-phosphate
  modified_base 4: mod_base = OTHER; note = 2'-O-methylguanosine-3'-phosphate
  modified_base 5: mod_base = OTHER; note = 2'-O-methyluridine-3'-phosphate
  modified_base 6: mod_base = OTHER; note = 2'-O-methyluridine-3'-phosphate
  modified_base 7: mod_base = OTHER; note = 2'-fluorocytidine-3'-phosphate
  modified_base 8: mod_base = OTHER; note = 2'-O-methylguanosine-3'-phosphate
  modified_base 9: mod_base = OTHER; note = 2'-fluorocytidine-3'-phosphate
  modified_base 10: mod_base = OTHER; note = 2'-fluorocytidine-3'-phosphate
  modified_base 11: mod_base = OTHER; note = 2'-fluoroadenosine-3'-phosphate
  modified_base 12: mod_base = OTHER; note = 2'-O-methylguanosine-3'-phosphate
  modified_base 13: mod_base = OTHER; note = 2'-O-methylguanosine-3'-phosphate
  modified_base 14: mod_base = OTHER; note = 2'-O-methylcytidine-3'-phosphate
  modified_base 15: mod_base = OTHER; note = 2'-O-methyladenosine-3'-phosphate
  modified_base 16: mod_base = OTHER; note = 2'-O-methyladenosine-3'-phosphate
  modified_base 17: mod_base = OTHER; note = 2'-O-methylcytidine-3'-phosphate
  modified_base 18: mod_base = OTHER; note = 2'-O-methylcytidine-3'-phosphate
  modified_base 19: mod_base = OTHER; note = 2'-O-methyladenosine-3'-phosphate
  modified_base 20: mod_base = OTHER; note = 2'-O-methyladenosine-3'-phosphate
  modified_base 21: mod_base = OTHER; note 2'-O-methyluridine-3'-phosphate-N-[tris(GalNAc-alkyl)-amido decanoyl)]-4-hydroxyprolinol (Hyp-(GalNAc-alkyl)3)
tctgttcgccaggcaaccaat

SEQ ID NO: 5024 - RNA, 21 nt, synthetic construct
  source 1..21: mol_type = other RNA
  modified_base 1: mod_base = OTHER; note = 2'-O-methyluridine-3'-phosphorothioate
  modified_base 2: mod_base = OTHER; note = 2'-O-methylcytidine-3'- phosphorothioate
  modified_base 3: mod_base = OTHER; note = 2'-O-methylguanosine-3'-phosphate
  modified_base 4: mod_base = OTHER; note = 2'-O-methylcytidine-3'-phosphate
  modified_base 5: mod_base = OTHER; note = 2'-O-methylcytidine-3'-phosphate
  modified_base 6: mod_base = OTHER; note = 2'-O-methyladenosine-3'-phosphate
  modified_base 7: mod_base = OTHER; note = 2'-fluoroguanosine-3'-phosphate
  modified_base 8: mod_base = OTHER; note = 2'-O-methylguanosine-3'-phosphate
  modified_base 9: mod_base = OTHER; note = 2'-fluorocytidine-3'-phosphate
  modified_base 10: mod_base = OTHER; note = 2'-fluoroadenosine-3'-phosphate
  modified_base 11: mod_base = OTHER; note = 2'-fluoroadenosine-3'-phosphate
  modified_base 12: mod_base = OTHER; note = 2'-O-methylcytidine-3'-phosphate
  modified_base 13: mod_base = OTHER; note = 2'-O-methylcytidine-3'-phosphate
  modified_base 14: mod_base = OTHER; note = 2'-O-methyladenosine-3'-phosphate
  modified_base 15: mod_base = OTHER; note = 2'-O-methyladenosine-3'-phosphate
  modified_base 16: mod_base = OTHER; note = 2'-O-methylguanosine-3'-phosphate
  modified_base 17: mod_base = OTHER; note = 2'-O-methylcytidine-3'-phosphate
  modified_base 18: mod_base = OTHER; note = 2'-O-methylguanosine-3'-phosphate
  modified_base 19: mod_base = OTHER; note = 2'-O-methylcytidine-3'-phosphate
  modified_base 20: mod_base = OTHER; note = 2'-O-methyladenosine-3'-phosphate
  modified_base 21: mod_base = OTHER; note 2'-O-methyluridine-3'-phosphate-N-[tris(GalNAc-alkyl)-amido decanoyl)]-4-hydroxyprolinol (Hyp-(GalNAc-alkyl)3)
tcgccaggcaaccaagcgcat

SEQ ID NO: 5025 - RNA, 21 nt, synthetic construct
  source 1..21: mol_type = other RNA
  modified_base 1: mod_base = OTHER; note = 2'-O-methylguanosine-3'- phosphorothioate
  modified_base 2: mod_base = OTHER; note = 2'-O-methylcytidine-3'- phosphorothioate
  modified_base 3: mod_base = OTHER; note = 2'-O-methyladenosine-3'-phosphate
  modified_base 4: mod_base = OTHER; note = 2'-O-methyladenosine-3'-phosphate
  modified_base 5: mod_base = OTHER; note = 2'-O-methylcytidine-3'-phosphate
  modified_base 6: mod_base = OTHER; note = 2'-O-methylcytidine-3'-phosphate
  modified_base 7: mod_base = OTHER; note = 2'-fluoroadenosine-3'-phosphate
  modified_base 8: mod_base = OTHER; note = 2'-O-methyladenosine-3'-phosphate
  modified_base 9: mod_base = OTHER; note = 2'-fluoroguanosine-3'-phosphate
  modified_base 10: mod_base = OTHER; note = 2'-fluorocytidine-3'-phosphate
  modified_base 11: mod_base = OTHER; note = 2'-fluoroguanosine-3'-phosphate
  modified_base 12: mod_base = OTHER; note = 2'-O-methylcytidine-3'-phosphate
  modified_base 13: mod_base = OTHER; note = 2'-O-methyladenosine-3'-phosphate
  modified_base 14: mod_base = OTHER; note = 2'-O-methyluridine-3'-phosphate
  modified_base 15: mod_base = OTHER; note = 2'-O-methylguanosine-3'-phosphate
  modified_base 16: mod_base = OTHER; note = 2'-O-methyluridine-3'-phosphate
  modified_base 17: mod_base = OTHER; note = 2'-O-methylguanosine-3'-phosphate
  modified_base 18: mod_base = OTHER; note = 2'-O-methylguanosine-3'-phosphate
  modified_base 19: mod_base = OTHER; note = 2'-O-methylguanosine-3'-phosphate
  modified_base 20: mod_base = OTHER; note = 2'-O-methyladenosine-3'-phosphate
  modified_base 21: mod_base = OTHER; note 2'-O-methyluridine-3'-phosphate-N-[tris(GalNAc-alkyl)-amido decanoyl)]-4-hydroxyprolinol (Hyp-(GalNAc-alkyl)3)
gcaaccaagcgcatgtgggat

SEQ ID NO: 5026 - RNA, 21 nt, synthetic construct
  source 1..21: mol_type = other RNA
  modified_base 1: mod_base = OTHER; note = 2'-O-methylcytidine-3'- phosphorothioate
  modified_base 2: mod_base = OTHER; note = 2'-O-methyladenosine-3'- phosphorothioate
  modified_base 3: mod_base = OTHER; note = 2'-O-methyladenosine-3'-phosphate
  modified_base 4: mod_base = OTHER; note = 2'-O-methylguanosine-3'-phosphate
  modified_base 5: mod_base = OTHER; note = 2'-O-methylcytidine-3'-phosphate
  modified_base 6: mod_base = OTHER; note = 2'-O-methylguanosine-3'-phosphate
  modified_base 7: mod_base = OTHER; note = 2'-fluorocytidine-3'-phosphate
  modified_base 8: mod_base = OTHER; note = 2'-O-methyladenosine-3'-phosphate
  modified_base 9: mod_base = OTHER; note = 2'-fluorouridine-3'-phosphate
  modified_base 10: mod_base = OTHER; note = 2'-fluoroguanosine-3'-phosphate
  modified_base 11: mod_base = OTHER; note = 2'-fluorouridine-3'-phosphate
  modified_base 12: mod_base = OTHER; note = 2'-O-methylguanosine-3'-phosphate
  modified_base 13: mod_base = OTHER; note = 2'-O-methylguanosine-3'-phosphate
  modified_base 14: mod_base = OTHER; note = 2'-O-methylguanosine-3'-phosphate
  modified_base 15: mod_base = OTHER; note = 2'-O-methyladenosine-3'-phosphate
  modified_base 16: mod_base = OTHER; note = 2'-O-methylguanosine-3'-phosphate
  modified_base 17: mod_base = OTHER; note = 2'-O-methylcytidine-3'-phosphate
  modified_base 18: mod_base = OTHER; note = 2'-O-methyluridine-3'-phosphate
  modified_base 19: mod_base = OTHER; note = 2'-O-methylguanosine-3'-phosphate
  modified_base 20: mod_base = OTHER; note = 2'-O-methylguanosine-3'-phosphate
  modified_base 21: mod_base = OTHER; note 2'-O-methyluridine-3'-phosphate-N-[tris(GalNAc-alkyl)-amido decanoyl)]-4-hydroxyprolinol (Hyp-(GalNAc-alkyl)3)
caagcgcatgtgggagctggt

SEQ ID NO: 5027 - RNA, 21 nt, synthetic construct
  source 1..21: mol_type = other RNA
  modified_base 1: mod_base = OTHER; note = 2'-O-methylguanosine-3'- phosphorothioate
  modified_base 2: mod_base = OTHER; note = 2'-O-methylcytidine-3'- phosphorothioate
  modified_base 3: mod_base = OTHER; note = 2'-O-methyladenosine-3'-phosphate
  modified_base 4: mod_base = OTHER; note = 2'-O-methyluridine-3'-phosphate
  modified_base 5: mod_base = OTHER; note = 2'-O-methylguanosine-3'-phosphate
  modified_base 6: mod_base = OTHER; note = 2'-O-methyluridine-3'-phosphate
  modified_base 7: mod_base = OTHER; note = 2'-fluoroguanosine-3'-phosphate
  modified_base 8: mod_base = OTHER; note = 2'-O-methylguanosine-3'-phosphate
  modified_base 9: mod_base = OTHER; note = 2'-fluoroguanosine-3'-phosphate
  modified_base 10: mod_base = OTHER; note = 2'-fluoroadenosine-3'-phosphate
  modified_base 11: mod_base = OTHER; note = 2'-fluoroguanosine-3'-phosphate
  modified_base 12: mod_base = OTHER; note = 2'-O-methylcytidine-3'-phosphate
  modified_base 13: mod_base = OTHER; note = 2'-O-methyluridine-3'-phosphate
  modified_base 14: mod_base = OTHER; note = 2'-O-methylguanosine-3'-phosphate
  modified_base 15: mod_base = OTHER; note = 2'-O-methylguanosine-3'-phosphate
  modified_base 16: mod_base = OTHER; note = 2'-O-methylguanosine-3'-phosphate
  modified_base 17: mod_base = OTHER; note = 2'-O-methylcytidine-3'-phosphate
  modified_base 18: mod_base = OTHER; note = 2'-O-methyladenosine-3'-phosphate
  modified_base 19: mod_base = OTHER; note = 2'-O-methyluridine-3'-phosphate
  modified_base 20: mod_base = OTHER; note = 2'-O-methyluridine-3'-phosphate
  modified_base 21: mod_base = OTHER; note 2'-O-methyluridine-3'-phosphate-N-[tris(GalNAc-alkyl)-amido decanoyl)]-4-hydroxyprolinol (Hyp-(GalNAc-alkyl)3)
gcatgtgggagctgggcattt

SEQ ID NO: 5028 - RNA, 21 nt, synthetic construct
  source 1..21: mol_type = other RNA
  modified_base 1: mod_base = OTHER; note = 2'-O-methyluridine-3'-phosphorothioate
  modified_base 2: mod_base = OTHER; note = 2'-O-methylguanosine-3'- phosphorothioate
  modified_base 3: mod_base = OTHER; note = 2'-O-methylguanosine-3'-phosphate
  modified_base 4: mod_base = OTHER; note = 2'-O-methylguanosine-3'-phosphate
  modified_base 5: mod_base = OTHER; note = 2'-O-methyladenosine-3'-phosphate
  modified_base 6: mod_base = OTHER; note = 2'-O-methylguanosine-3'-phosphate
  modified_base 7: mod_base = OTHER; note = 2'-fluorocytidine-3'-phosphate
  modified_base 8: mod_base = OTHER; note = 2'-O-methyluridine-3'-phosphate
  modified_base 9: mod_base = OTHER; note = 2'-fluoroguanosine-3'-phosphate
  modified_base 10: mod_base = OTHER; note = 2'-fluoroguanosine-3'-phosphate
  modified_base 11: mod_base = OTHER; note = 2'-fluoroguanosine-3'-phosphate
  modified_base 12: mod_base = OTHER; note = 2'-O-methylcytidine-3'-phosphate
  modified_base 13: mod_base = OTHER; note = 2'-O-methyladenosine-3'-phosphate
  modified_base 14: mod_base = OTHER; note = 2'-O-methyluridine-3'-phosphate
  modified_base 15: mod_base = OTHER; note = 2'-O-methyluridine-3'-phosphate
  modified_base 16: mod_base = OTHER; note = 2'-O-methylcytidine-3'-phosphate
  modified_base 17: mod_base = OTHER; note = 2'-O-methylcytidine-3'-phosphate
  modified_base 18: mod_base = OTHER; note = 2'-O-methyluridine-3'-phosphate
  modified_base 19: mod_base = OTHER; note = 2'-O-methylcytidine-3'-phosphate
  modified_base 20: mod_base = OTHER; note = 2'-O-methyluridine-3'-phosphate
  modified_base 21: mod_base = OTHER; note 2'-O-methyluridine-3'-phosphate-N-[tris(GalNAc-alkyl)-amido decanoyl)]-4-hydroxyprolinol (Hyp-(GalNAc-alkyl)3)
tgggagctgggcattcctctt

SEQ ID NO: 5029 - RNA, 21 nt, synthetic construct
  source 1..21: mol_type = other RNA
  modified_base 1: mod_base = OTHER; note = 2'-O-methylguanosine-3'- phosphorothioate
  modified_base 2: mod_base = OTHER; note = 2'-O-methylguanosine-3'- phosphorothioate
  modified_base 3: mod_base = OTHER; note = 2'-O-methylguanosine-3'-phosphate
  modified_base 4: mod_base = OTHER; note = 2'-O-methylcytidine-3'-phosphate
  modified_base 5: mod_base = OTHER; note = 2'-O-methyladenosine-3'-phosphate
  modified_base 6: mod_base = OTHER; note = 2'-O-methyluridine-3'-phosphate
  modified_base 7: mod_base = OTHER; note = 2'-fluorouridine-3'-phosphate
  modified_base 8: mod_base = OTHER; note = 2'-O-methylcytidine-3'-phosphate
  modified_base 9: mod_base = OTHER; note = 2'-fluorocytidine-3'-phosphate
  modified_base 10: mod_base = OTHER; note = 2'-fluorouridine-3'-phosphate
  modified_base 11: mod_base = OTHER; note = 2'-fluorocytidine-3'-phosphate
  modified_base 12: mod_base = OTHER; note = 2'-O-methyluridine-3'-phosphate
  modified_base 13: mod_base = OTHER; note = 2'-O-methylguanosine-3'-phosphate
  modified_base 14: mod_base = OTHER; note = 2'-O-methylguanosine-3'-phosphate
  modified_base 15: mod_base = OTHER; note = 2'-O-methyladenosine-3'-phosphate
  modified_base 16: mod_base = OTHER; note = 2'-O-methyluridine-3'-phosphate
  modified_base 17: mod_base = OTHER; note = 2'-O-methylguanosine-3'-phosphate
  modified_base 18: mod_base = OTHER; note = 2'-O-methylguanosine-3'-phosphate
  modified_base 19: mod_base = OTHER; note = 2'-O-methylguanosine-3'-phosphate
  modified_base 20: mod_base = OTHER; note = 2'-O-methyladenosine-3'-phosphate
  modified_base 21: mod_base = OTHER; note 2'-O-methyluridine-3'-phosphate-N-[tris(GalNAc-alkyl)-amido decanoyl)]-4-hydroxyprolinol (Hyp-(GalNAc-alkyl)3)
gggcattcctctggatgggat

SEQ ID NO: 5030 - RNA, 21 nt, synthetic construct
  source 1..21: mol_type = other RNA
  modified_base 1: mod_base = OTHER; note = 2'-O-methyluridine-3'-phosphorothioate
  modified_base 2: mod_base = OTHER; note = 2'-O-methyluridine-3'-phosphorothioate
  modified_base 3: mod_base = OTHER; note = 2'-O-methylcytidine-3'-phosphate
  modified_base 4: mod_base = OTHER; note = 2'-O-methylcytidine-3'-phosphate
  modified_base 5: mod_base = OTHER; note = 2'-O-methyluridine-3'-phosphate
  modified_base 6: mod_base = OTHER; note = 2'-O-methylcytidine-3'-phosphate
  modified_base 7: mod_base = OTHER; note = 2'-fluorouridine-3'-phosphate
  modified_base 8: mod_base = OTHER; note = 2'-O-methylguanosine-3'-phosphate
  modified_base 9: mod_base = OTHER; note = 2'-fluoroguanosine-3'-phosphate
  modified_base 10: mod_base = OTHER; note = 2'-fluoroadenosine-3'-phosphate
  modified_base 11: mod_base = OTHER; note = 2'-fluorouridine-3'-phosphate
  modified_base 12: mod_base = OTHER; note = 2'-O-methylguanosine-3'-phosphate
  modified_base 13: mod_base = OTHER; note = 2'-O-methylguanosine-3'-phosphate
  modified_base 14: mod_base = OTHER; note = 2'-O-methylguanosine-3'-phosphate
  modified_base 15: mod_base = OTHER; note = 2'-O-methyladenosine-3'-phosphate
  modified_base 16: mod_base = OTHER; note = 2'-O-methylcytidine-3'-phosphate
  modified_base 17: mod_base = OTHER; note = 2'-O-methyluridine-3'-phosphate
  modified_base 18: mod_base = OTHER; note = 2'-O-methylguanosine-3'-phosphate
  modified_base 19: mod_base = OTHER; note = 2'-O-methyluridine-3'-phosphate
  modified_base 20: mod_base = OTHER; note = 2'-O-methylcytidine-3'-phosphate
  modified_base 21: mod_base = OTHER; note 2'-O-methyluridine-3'-phosphate-N-[tris(GalNAc-alkyl)-amido decanoyl)]-4-hydroxyprolinol (Hyp-(GalNAc-alkyl)3)
ttcctctggatgggactgtct

SEQ ID NO: 5031 - RNA, 21 nt, synthetic construct
  source 1..21: mol_type = other RNA
  modified_base 1: mod_base = OTHER; note = 2'-O-methylcytidine-3'- phosphorothioate
  modified_base 2: mod_base = OTHER; note = 2'-O-methyluridine-3'-phosphorothioate
  modified_base 3: mod_base = OTHER; note = 2'-O-methylguanosine-3'-phosphate
  modified_base 4: mod_base = OTHER; note = 2'-O-methylguanosine-3'-phosphate
  modified_base 5: mod_base = OTHER; note = 2'-O-methyladenosine-3'-phosphate
  modified_base 6: mod_base = OTHER; note = 2'-O-methyluridine-3'-phosphate
  modified_base 7: mod_base = OTHER; note = 2'-fluoroguanosine-3'-phosphate
  modified_base 8: mod_base = OTHER; note = 2'-O-methylguanosine-3'-phosphate
  modified_base 9: mod_base = OTHER; note = 2'-fluoroguanosine-3'-phosphate
  modified_base 10: mod_base = OTHER; note = 2'-fluoroadenosine-3'-phosphate
  modified_base 11: mod_base = OTHER; note = 2'-fluorocytidine-3'-phosphate
  modified_base 12: mod_base = OTHER; note = 2'-O-methyluridine-3'-phosphate
  modified_base 13: mod_base = OTHER; note = 2'-O-methylguanosine-3'-phosphate
  modified_base 14: mod_base = OTHER; note = 2'-O-methyluridine-3'-phosphate
  modified_base 15: mod_base = OTHER; note = 2'-O-methylcytidine-3'-phosphate
  modified_base 16: mod_base = OTHER; note = 2'-O-methyluridine-3'-phosphate
  modified_base 17: mod_base = OTHER; note = 2'-O-methylguanosine-3'-phosphate
  modified_base 18: mod_base = OTHER; note = 2'-O-methyluridine-3'-phosphate
  modified_base 19: mod_base = OTHER; note = 2'-O-methyluridine-3'-phosphate
  modified_base 20: mod_base = OTHER; note = 2'-O-methyluridine-3'-phosphate
  modified_base 21: mod_base = OTHER; note 2'-O-methyluridine-3'-phosphate-N-[tris(GalNAc-alkyl)-amido decanoyl)]-4-hydroxyprolinol (Hyp-(GalNAc-alkyl)3)
ctggatgggactgtctgtttt

SEQ ID NO: 5032 - RNA, 21 nt, synthetic construct
  source 1..21: mol_type = other RNA
  modified_base 1: mod_base = OTHER; note = 2'-O-methyluridine-3'-phosphorothioate
  modified_base 2: mod_base = OTHER; note = 2'-O-methylguanosine-3'- phosphorothioate
  modified_base 3: mod_base = OTHER; note = 2'-O-methylguanosine-3'-phosphate
  modified_base 4: mod_base = OTHER; note = 2'-O-methylguanosine-3'-phosphate
  modified_base 5: mod_base = OTHER; note = 2'-O-methyladenosine-3'-phosphate
  modified_base 6: mod_base = OTHER; note = 2'-O-methylcytidine-3'-phosphate
  modified_base 7: mod_base = OTHER; note = 2'-fluorouridine-3'-phosphate
  modified_base 8: mod_base = OTHER; note = 2'-O-methylguanosine-3'-phosphate
  modified_base 9: mod_base = OTHER; note = 2'-fluorouridine-3'-phosphate
  modified_base 10: mod_base = OTHER; note = 2'-fluorocytidine-3'-phosphate
  modified_base 11: mod_base = OTHER; note = 2'-fluorouridine-3'-phosphate
  modified_base 12: mod_base = OTHER; note = 2'-O-methylguanosine-3'-phosphate
  modified_base 13: mod_base = OTHER; note = 2'-O-methyluridine-3'-phosphate
  modified_base 14: mod_base = OTHER; note = 2'-O-methyluridine-3'-phosphate
  modified_base 15: mod_base = OTHER; note = 2'-O-methyluridine-3'-phosphate
  modified_base 16: mod_base = OTHER; note = 2'-O-methylcytidine-3'-phosphate
  modified_base 17: mod_base = OTHER; note = 2'-O-methylguanosine-3'-phosphate
  modified_base 18: mod_base = OTHER; note = 2'-O-methylguanosine-3'-phosphate
  modified_base 19: mod_base = OTHER; note = 2'-O-methyladenosine-3'-phosphate
  modified_base 20: mod_base = OTHER; note = 2'-O-methylcytidine-3'-phosphate
  modified_base 21: mod_base = OTHER; note 2'-O-methyluridine-3'-phosphate-N-[tris(GalNAc-alkyl)-amido decanoyl)]-4-hydroxyprolinol (Hyp-(GalNAc-alkyl)3)
tgggactgtctgtttcggact

SEQ ID NO: 5033 - RNA, 21 nt, synthetic construct
  source 1..21: mol_type = other RNA
  modified_base 1: mod_base = OTHER; note = 2'-O-methylcytidine-3'- phosphorothioate
  modified_base 2: mod_base = OTHER; note = 2'-O-methyluridine-3'-phosphorothioate
  modified_base 3: mod_base = OTHER; note = 2'-O-methylguanosine-3'-phosphate
  modified_base 4: mod_base = OTHER; note = 2'-O-methyluridine-3'-phosphate
  modified_base 5: mod_base = OTHER; note = 2'-O-methylcytidine-3'-phosphate
  modified_base 6: mod_base = OTHER; note = 2'-O-methyluridine-3'-phosphate
  modified_base 7: mod_base = OTHER; note = 2'-fluoroguanosine-3'-phosphate
  modified_base 8: mod_base = OTHER; note = 2'-O-methyluridine-3'-phosphate
  modified_base 9: mod_base = OTHER; note = 2'-fluorouridine-3'-phosphate
  modified_base 10: mod_base = OTHER; note = 2'-fluorouridine-3'-phosphate
  modified_base 11: mod_base = OTHER; note = 2'-fluorocytidine-3'-phosphate
  modified_base 12: mod_base = OTHER; note = 2'-O-methylguanosine-3'-phosphate
  modified_base 13: mod_base = OTHER; note = 2'-O-methylguanosine-3'-phosphate
  modified_base 14: mod_base = OTHER; note = 2'-O-methyladenosine-3'-phosphate
  modified_base 15: mod_base = OTHER; note = 2'-O-methylcytidine-3'-phosphate
  modified_base 16: mod_base = OTHER; note = 2'-O-methyladenosine-3'-phosphate
  modified_base 17: mod_base = OTHER; note = 2'-O-methyladenosine-3'-phosphate
  modified_base 18: mod_base = OTHER; note = 2'-O-methylcytidine-3'-phosphate
  modified_base 19: mod_base = OTHER; note = 2'-O-methyluridine-3'-phosphate
  modified_base 20: mod_base = OTHER; note = 2'-O-methyluridine-3'-phosphate
  modified_base 21: mod_base = OTHER; note 2'-O-methyluridine-3'-phosphate-N-[tris(GalNAc-alkyl)-amido decanoyl)]-4-hydroxyprolinol (Hyp-(GalNAc-alkyl)3)
ctgtctgtttcggacaacttt

SEQ ID NO: 5034 - RNA, 21 nt, synthetic construct
  source 1..21: mol_type = other RNA
  modified_base 1: mod_base = OTHER; note = 2'-O-methyluridine-3'-phosphorothioate
  modified_base 2: mod_base = OTHER; note = 2'-O-methyluridine-3'-phosphorothioate
  modified_base 3: mod_base = OTHER; note = 2'-O-methylcytidine-3'-phosphate
  modified_base 4: mod_base = OTHER; note = 2'-O-methylguanosine-3'-phosphate
  modified_base 5: mod_base = OTHER; note = 2'-O-methylguanosine-3'-phosphate
  modified_base 6: mod_base = OTHER; note = 2'-O-methyladenosine-3'-phosphate
  modified_base 7: mod_base = OTHER; note = 2'-fluorocytidine-3'-phosphate
  modified_base 8: mod_base = OTHER; note = 2'-O-methyladenosine-3'-phosphate
  modified_base 9: mod_base = OTHER; note = 2'-fluoroadenosine-3'-phosphate
  modified_base 10: mod_base = OTHER; note = 2'-fluorocytidine-3'-phosphate
  modified_base 11: mod_base = OTHER; note = 2'-fluorouridine-3'-phosphate
  modified_base 12: mod_base = OTHER; note = 2'-O-methyluridine-3'-phosphate
  modified_base 13: mod_base = OTHER; note = 2'-O-methylcytidine-3'-phosphate
  modified_base 14: mod_base = OTHER; note = 2'-O-methyluridine-3'-phosphate
  modified_base 15: mod_base = OTHER; note = 2'-O-methylguanosine-3'-phosphate
  modified_base 16: mod_base = OTHER; note = 2'-O-methylguanosine-3'-phosphate
  modified_base 17: mod_base = OTHER; note = 2'-O-methylguanosine-3'-phosphate
  modified_base 18: mod_base = OTHER; note = 2'-O-methylcytidine-3'-phosphate
  modified_base 19: mod_base = OTHER; note = 2'-O-methyladenosine-3'-phosphate
  modified_base 20: mod_base = OTHER; note = 2'-O-methyluridine-3'-phosphate
  modified_base 21: mod_base = OTHER; note 2'-O-methyluridine-3'-phosphate-N-[tris(GalNAc-alkyl)-amido decanoyl)]-4-hydroxyprolinol (Hyp-(GalNAc-alkyl)3)
ttcggacaacttctgggcatt

SEQ ID NO: 5035 - RNA, 21 nt, synthetic construct
  source 1..21: mol_type = other RNA
  modified_base 1: mod_base = OTHER; note = 2'-O-methylcytidine-3'- phosphorothioate
  modified_base 2: mod_base = OTHER; note = 2'-O-methyluridine-3'-phosphorothioate
  modified_base 3: mod_base = OTHER; note = 2'-O-methyluridine-3'-phosphate
  modified_base 4: mod_base = OTHER; note = 2'-O-methylcytidine-3'-phosphate
  modified_base 5: mod_base = OTHER; note = 2'-O-methyluridine-3'-phosphate
  modified_base 6: mod_base = OTHER; note = 2'-O-methylguanosine-3'-phosphate
  modified_base 7: mod_base = OTHER; note = 2'-fluoroguanosine-3'-phosphate
  modified_base 8: mod_base = OTHER; note = 2'-O-methylguanosine-3'-phosphate
  modified_base 9: mod_base = OTHER; note = 2'-fluorocytidine-3'-phosphate
  modified_base 10: mod_base = OTHER; note = 2'-fluoroadenosine-3'-phosphate
  modified_base 11: mod_base = OTHER; note = 2'-fluorouridine-3'-phosphate
  modified_base 12: mod_base = OTHER; note = 2'-O-methylguanosine-3'-phosphate
  modified_base 13: mod_base = OTHER; note = 2'-O-methyluridine-3'-phosphate
  modified_base 14: mod_base = OTHER; note = 2'-O-methylguanosine-3'-phosphate
  modified_base 15: mod_base = OTHER; note = 2'-O-methyluridine-3'-phosphate
  modified_base 16: mod_base = OTHER; note = 2'-O-methylguanosine-3'-phosphate
  modified_base 17: mod_base = OTHER; note = 2'-O-methyladenosine-3'-phosphate
  modified_base 18: mod_base = OTHER; note = 2'-O-methylcytidine-3'-phosphate
  modified_base 19: mod_base = OTHER; note = 2'-O-methylcytidine-3'-phosphate
  modified_base 20: mod_base = OTHER; note = 2'-O-methyladenosine-3'-phosphate
  modified_base 21: mod_base = OTHER; note 2'-O-methyluridine-3'-phosphate-N-[tris(GalNAc-alkyl)-amido decanoyl)]-4-hydroxyprolinol (Hyp-(GalNAc-alkyl)3)
cttctgggcatgtgtgaccat

SEQ ID NO: 5036 - RNA, 21 nt, synthetic construct
  source 1..21: mol_type = other RNA
  modified_base 1: mod_base = OTHER; note = 2'-O-methyladenosine-3'- phosphorothioate
  modified_base 2: mod_base = OTHER; note = 2'-O-methyluridine-3'-phosphorothioate
  modified_base 3: mod_base = OTHER; note = 2'-O-methylguanosine-3'-phosphate
  modified_base 4: mod_base = OTHER; note = 2'-O-methyluridine-3'-phosphate
  modified_base 5: mod_base = OTHER; note = 2'-O-methylguanosine-3'-phosphate
  modified_base 6: mod_base = OTHER; note = 2'-O-methyluridine-3'-phosphate
  modified_base 7: mod_base = OTHER; note = 2'-fluoroguanosine-3'-phosphate
  modified_base 8: mod_base = OTHER; note = 2'-O-methyladenosine-3'-phosphate
  modified_base 9: mod_base = OTHER; note = 2'-fluorocytidine-3'-phosphate
  modified_base 10: mod_base = OTHER; note = 2'-fluorocytidine-3'-phosphate
  modified_base 11: mod_base = OTHER; note = 2'-fluoroadenosine-3'-phosphate
  modified_base 12: mod_base = OTHER; note = 2'-O-methylcytidine-3'-phosphate
  modified_base 13: mod_base = OTHER; note = 2'-O-methylguanosine-3'-phosphate
  modified_base 14: mod_base = OTHER; note = 2'-O-methyluridine-3'-phosphate
  modified_base 15: mod_base = OTHER; note = 2'-O-methylcytidine-3'-phosphate
  modified_base 16: mod_base = OTHER; note = 2'-O-methyluridine-3'-phosphate
  modified_base 17: mod_base = OTHER; note = 2'-O-methylcytidine-3'-phosphate
  modified_base 18: mod_base = OTHER; note = 2'-O-methyluridine-3'-phosphate
  modified_base 19: mod_base = OTHER; note = 2'-O-methylcytidine-3'-phosphate
  modified_base 20: mod_base = OTHER; note = 2'-O-methyluridine-3'-phosphate
  modified_base 21: mod_base = OTHER; note 2'-O-methyluridine-3'-phosphate-N-[tris(GalNAc-alkyl)-amido decanoyl)]-4-hydroxyprolinol (Hyp-(GalNAc-alkyl)3)
atgtgtgaccacgtctctctt

SEQ ID NO: 5037 - RNA, 21 nt, synthetic construct
  source 1..21: mol_type = other RNA
  modified_base 1: mod_base = OTHER; note = 2'-O-methylguanosine-3'- phosphorothioate
  modified_base 2: mod_base = OTHER; note = 2'-O-methyladenosine-3'- phosphorothioate
  modified_base 3: mod_base = OTHER; note = 2'-O-methylcytidine-3'-phosphate
  modified_base 4: mod_base = OTHER; note = 2'-O-methylcytidine-3'-phosphate
  modified_base 5: mod_base = OTHER; note = 2'-O-methyladenosine-3'-phosphate
  modified_base 6: mod_base = OTHER; note = 2'-O-methylcytidine-3'-phosphate
  modified_base 7: mod_base = OTHER; note = 2'-fluoroguanosine-3'-phosphate
  modified_base 8: mod_base = OTHER; note = 2'-O-methyluridine-3'-phosphate
  modified_base 9: mod_base = OTHER; note = 2'-fluorocytidine-3'-phosphate
  modified_base 10: mod_base = OTHER; note = 2'-fluorouridine-3'-phosphate
  modified_base 11: mod_base = OTHER; note = 2'-fluorocytidine-3'-phosphate
  modified_base 12: mod_base = OTHER; note = 2'-O-methyluridine-3'-phosphate
  modified_base 13: mod_base = OTHER; note = 2'-O-methylcytidine-3'-phosphate
  modified_base 14: mod_base = OTHER; note = 2'-O-methyluridine-3'-phosphate
  modified_base 15: mod_base = OTHER; note = 2'-O-methyladenosine-3'-phosphate
  modified_base 16: mod_base = OTHER; note = 2'-O-methylguanosine-3'-phosphate
  modified_base 17: mod_base = OTHER; note = 2'-O-methylcytidine-3'-phosphate
  modified_base 18: mod_base = OTHER; note = 2'-O-methyladenosine-3'-phosphate
  modified_base 19: mod_base = OTHER; note = 2'-O-methylcytidine-3'-phosphate
  modified_base 20: mod_base = OTHER; note = 2'-O-methyluridine-3'-phosphate
  modified_base 21: mod_base = OTHER; note 2'-O-methyluridine-3'-phosphate-N-[tris(GalNAc-alkyl)-amido decanoyl)]-4-hydroxyprolinol (Hyp-(GalNAc-alkyl)3)
gaccacgtctctctagcactt

SEQ ID NO: 5038 - RNA, 21 nt, synthetic construct
  source 1..21: mol_type = other RNA
  modified_base 1: mod_base = OTHER; note = 2'-O-methylguanosine-3'- phosphorothioate
  modified_base 2: mod_base = OTHER; note = 2'-O-methylcytidine-3'- phosphorothioate
  modified_base 3: mod_base = OTHER; note = 2'-O-methyladenosine-3'-phosphate
  modified_base 4: mod_base = OTHER; note = 2'-O-methylguanosine-3'-phosphate
  modified_base 5: mod_base = OTHER; note = 2'-O-methylguanosine-3'-phosphate
  modified_base 6: mod_base = OTHER; note = 2'-O-methylcytidine-3'-phosphate
  modified_base 7: mod_base = OTHER; note = 2'-fluorocytidine-3'-phosphate
  modified_base 8: mod_base = OTHER; note = 2'-O-methylguanosine-3'-phosphate
  modified_base 9: mod_base = OTHER; note = 2'-fluoroguanosine-3'-phosphate
  modified_base 10: mod_base = OTHER; note = 2'-fluorocytidine-3'-phosphate
  modified_base 11: mod_base = OTHER; note = 2'-fluorouridine-3'-phosphate
  modified_base 12: mod_base = OTHER; note = 2'-O-methyladenosine-3'-phosphate
  modified_base 13: mod_base = OTHER; note = 2'-O-methyluridine-3'-phosphate
  modified_base 14: mod_base = OTHER; note = 2'-O-methylguanosine-3'-phosphate
  modified_base 15: mod_base = OTHER; note = 2'-O-methyluridine-3'-phosphate
  modified_base 16: mod_base = OTHER; note = 2'-O-methyladenosine-3'-phosphate
  modified_base 17: mod_base = OTHER; note = 2'-O-methylguanosine-3'-phosphate
  modified_base 18: mod_base = OTHER; note = 2'-O-methyluridine-3'-phosphate
  modified_base 19: mod_base = OTHER; note = 2'-O-methylguanosine-3'-phosphate
  modified_base 20: mod_base = OTHER; note = 2'-O-methyluridine-3'-phosphate
  modified_base 21: mod_base = OTHER; note 2'-O-methyluridine-3'-phosphate-N-[tris(GalNAc-alkyl)-amido decanoyl)]-4-hydroxyprolinol (Hyp-(GalNAc-alkyl)3)
gcaggccggctatgtagtgtt

SEQ ID NO: 5039 - RNA, 21 nt, synthetic construct
  source 1..21: mol_type = other RNA
  modified_base 1: mod_base = OTHER; note = 2'-O-methylcytidine-3'- phosphorothioate
  modified_base 2: mod_base = OTHER; note = 2'-O-methylcytidine-3'- phosphorothioate
  modified_base 3: mod_base = OTHER; note = 2'-O-methylguanosine-3'-phosphate
  modified_base 4: mod_base = OTHER; note = 2'-O-methylguanosine-3'-phosphate
  modified_base 5: mod_base = OTHER; note = 2'-O-methylcytidine-3'-phosphate
  modified_base 6: mod_base = OTHER; note = 2'-O-methyluridine-3'-phosphate
  modified_base 7: mod_base = OTHER; note = 2'-fluoroadenosine-3'-phosphate
  modified_base 8: mod_base = OTHER; note = 2'-O-methyluridine-3'-phosphate
  modified_base 9: mod_base = OTHER; note = 2'-fluoroguanosine-3'-phosphate
  modified_base 10: mod_base = OTHER; note = 2'-fluorouridine-3'-phosphate
  modified_base 11: mod_base = OTHER; note = 2'-fluoroadenosine-3'-phosphate
  modified_base 12: mod_base = OTHER; note = 2'-O-methylguanosine-3'-phosphate
  modified_base 13: mod_base = OTHER; note = 2'-O-methyluridine-3'-phosphate
  modified_base 14: mod_base = OTHER; note = 2'-O-methylguanosine-3'-phosphate
  modified_base 15: mod_base = OTHER; note = 2'-O-methyluridine-3'-phosphate
  modified_base 16: mod_base = OTHER; note = 2'-O-methyladenosine-3'-phosphate
  modified_base 17: mod_base = OTHER; note = 2'-O-methyluridine-3'-phosphate
  modified_base 18: mod_base = OTHER; note = 2'-O-methyladenosine-3'-phosphate
  modified_base 19: mod_base = OTHER; note = 2'-O-methyladenosine-3'-phosphate
  modified_base 20: mod_base = OTHER; note = 2'-O-methylguanosine-3'-phosphate
  modified_base 21: mod_base = OTHER; note 2'-O-methyluridine-3'-phosphate-N-[tris(GalNAc-alkyl)-amido decanoyl)]-4-hydroxyprolinol (Hyp-(GalNAc-alkyl)3)
ccggctatgtagtgtataagt

SEQ ID NO: 5040 - RNA, 21 nt, synthetic construct
  source 1..21: mol_type = other RNA
  modified_base 1: mod_base = OTHER; note = 2'-O-methyladenosine-3'- phosphorothioate
  modified_base 2: mod_base = OTHER; note = 2'-O-methyluridine-3'-phosphorothioate
  modified_base 3: mod_base = OTHER; note = 2'-O-methylguanosine-3'-phosphate
  modified_base 4: mod_base = OTHER; note = 2'-O-methyluridine-3'-phosphate
  modified_base 5: mod_base = OTHER; note = 2'-O-methyladenosine-3'-phosphate
  modified_base 6: mod_base = OTHER; note = 2'-O-methylguanosine-3'-phosphate
  modified_base 7: mod_base = OTHER; note = 2'-fluorouridine-3'-phosphate
  modified_base 8: mod_base = OTHER; note = 2'-O-methylguanosine-3'-phosphate
  modified_base 9: mod_base = OTHER; note = 2'-fluorouridine-3'-phosphate
  modified_base 10: mod_base = OTHER; note = 2'-fluoroadenosine-3'-phosphate
  modified_base 11: mod_base = OTHER; note = 2'-fluorouridine-3'-phosphate
  modified_base 12: mod_base = OTHER; note = 2'-O-methyladenosine-3'-phosphate
  modified_base 13: mod_base = OTHER; note = 2'-O-methyladenosine-3'-phosphate
  modified_base 14: mod_base = OTHER; note = 2'-O-methylguanosine-3'-phosphate
  modified_base 15: mod_base = OTHER; note = 2'-O-methyluridine-3'-phosphate
  modified_base 16: mod_base = OTHER; note = 2'-O-methylcytidine-3'-phosphate
  modified_base 17: mod_base = OTHER; note = 2'-O-methylcytidine-3'-phosphate
  modified_base 18: mod_base = OTHER; note = 2'-O-methyladenosine-3'-phosphate
  modified_base 19: mod_base = OTHER; note = 2'-O-methyluridine-3'-phosphate
  modified_base 20: mod_base = OTHER; note = 2'-O-methyluridine-3'-phosphate
  modified_base 21: mod_base = OTHER; note 2'-O-methyluridine-3'-phosphate-N-[tris(GalNAc-alkyl)-amido decanoyl)]-4-hydroxyprolinol (Hyp-(GalNAc-alkyl)3)
atgtagtgtataagtccattt

SEQ ID NO: 5041 - RNA, 21 nt, synthetic construct
  source 1..21: mol_type = other RNA
  modified_base 1: mod_base = OTHER; note = 2'-O-methylguanosine-3'- phosphorothioate
  modified_base 2: mod_base = OTHER; note = 2'-O-methyluridine-3'-phosphorothioate
  modified_base 3: mod_base = OTHER; note = 2'-O-methylguanosine-3'-phosphate
  modified_base 4: mod_base = OTHER; note = 2'-O-methyluridine-3'-phosphate
  modified_base 5: mod_base = OTHER; note = 2'-O-methyladenosine-3'-phosphate
  modified_base 6: mod_base = OTHER; note = 2'-O-methyluridine-3'-phosphate
  modified_base 7: mod_base = OTHER; note = 2'-fluoroadenosine-3'-phosphate
  modified_base 8: mod_base = OTHER; note = 2'-O-methyladenosine-3'-phosphate
  modified_base 9: mod_base = OTHER; note = 2'-fluoroguanosine-3'-phosphate
  modified_base 10: mod_base = OTHER; note = 2'-fluorouridine-3'-phosphate
  modified_base 11: mod_base = OTHER; note = 2'-fluorocytidine-3'-phosphate
  modified_base 12: mod_base = OTHER; note = 2'-O-methylcytidine-3'-phosphate
  modified_base 13: mod_base = OTHER; note = 2'-O-methyladenosine-3'-phosphate
  modified_base 14: mod_base = OTHER; note = 2'-O-methyluridine-3'-phosphate
  modified_base 15: mod_base = OTHER; note = 2'-O-methyluridine-3'-phosphate
  modified_base 16: mod_base = OTHER; note = 2'-O-methylcytidine-3'-phosphate
  modified_base 17: mod_base = OTHER; note = 2'-O-methylcytidine-3'-phosphate
  modified_base 18: mod_base = OTHER; note = 2'-O-methylcytidine-3'-phosphate
  modified_base 19: mod_base = OTHER; note = 2'-O-methyluridine-3'-phosphate
  modified_base 20: mod_base = OTHER; note = 2'-O-methyladenosine-3'-phosphate
  modified_base 21: mod_base = OTHER; note 2'-O-methyluridine-3'-phosphate-N-[tris(GalNAc-alkyl)-amido decanoyl)]-4-hydroxyprolinol (Hyp-(GalNAc-alkyl)3)
gtgtataagtccattccctat

SEQ ID NO: 5042 - RNA, 21 nt, synthetic construct
  source 1..21: mol_type = other RNA
  modified_base 1: mod_base = OTHER; note = 2'-O-methyladenosine-3'- phosphorothioate
  modified_base 2: mod_base = OTHER; note = 2'-O-methyladenosine-3'- phosphorothioate
  modified_base 3: mod_base = OTHER; note = 2'-O-methylguanosine-3'-phosphate
  modified_base 4: mod_base = OTHER; note = 2'-O-methyluridine-3'-phosphate
  modified_base 5: mod_base = OTHER; note = 2'-O-methylcytidine-3'-phosphate
  modified_base 6: mod_base = OTHER; note = 2'-O-methylcytidine-3'-phosphate
  modified_base 7: mod_base = OTHER; note = 2'-fluoroadenosine-3'-phosphate
  modified_base 8: mod_base = OTHER; note = 2'-O-methyluridine-3'-phosphate
  modified_base 9: mod_base = OTHER; note = 2'-fluorouridine-3'-phosphate
  modified_base 10: mod_base = OTHER; note = 2'-fluorocytidine-3'-phosphate
  modified_base 11: mod_base = OTHER; note = 2'-fluorocytidine-3'-phosphate
  modified_base 12: mod_base = OTHER; note = 2'-O-methylcytidine-3'-phosphate
  modified_base 13: mod_base = OTHER; note = 2'-O-methyluridine-3'-phosphate
  modified_base 14: mod_base = OTHER; note = 2'-O-methyladenosine-3'-phosphate
  modified_base 15: mod_base = OTHER; note = 2'-O-methyluridine-3'-phosphate
  modified_base 16: mod_base = OTHER; note = 2'-O-methylguanosine-3'-phosphate
  modified_base 17: mod_base = OTHER; note = 2'-O-methylguanosine-3'-phosphate
  modified_base 18: mod_base = OTHER; note = 2'-O-methylcytidine-3'-phosphate
  modified_base 19: mod_base = OTHER; note = 2'-O-methyluridine-3'-phosphate
  modified_base 20: mod_base = OTHER; note = 2'-O-methylcytidine-3'-phosphate
  modified_base 21: mod_base = OTHER; note 2'-O-methyluridine-3'-phosphate-N-[tris(GalNAc-alkyl)-amido decanoyl)]-4-hydroxyprolinol (Hyp-(GalNAc-alkyl)3)
aagtccattccctatggctct

SEQ ID NO: 5043 - RNA, 21 nt, synthetic construct
  source 1..21: mol_type = other RNA
  modified_base 1: mod_base = OTHER; note = 2'-O-methyluridine-3'-phosphorothioate
  modified_base 2: mod_base = OTHER; note = 2'-O-methyluridine-3'-phosphorothioate
  modified_base 3: mod_base = OTHER; note = 2'-O-methylcytidine-3'-phosphate
  modified_base 4: mod_base = OTHER; note = 2'-O-methylcytidine-3'-phosphate
  modified_base 5: mod_base = OTHER; note = 2'-O-methylcytidine-3'-phosphate
  modified_base 6: mod_base = OTHER; note = 2'-O-methyluridine-3'-phosphate
  modified_base 7: mod_base = OTHER; note = 2'-fluoroadenosine-3'-phosphate
  modified_base 8: mod_base = OTHER; note = 2'-O-methyluridine-3'-phosphate
  modified_base 9: mod_base = OTHER; note = 2'-fluoroguanosine-3'-phosphate
  modified_base 10: mod_base = OTHER; note = 2'-fluoroguanosine-3'-phosphate
  modified_base 11: mod_base = OTHER; note = 2'-fluorocytidine-3'-phosphate
  modified_base 12: mod_base = OTHER; note = 2'-O-methyluridine-3'-phosphate
  modified_base 13: mod_base = OTHER; note = 2'-O-methylcytidine-3'-phosphate
  modified_base 14: mod_base = OTHER; note = 2'-O-methylcytidine-3'-phosphate
  modified_base 15: mod_base = OTHER; note = 2'-O-methyluridine-3'-phosphate
  modified_base 16: mod_base = OTHER; note = 2'-O-methyluridine-3'-phosphate
  modified_base 17: mod_base = OTHER; note = 2'-O-methylguanosine-3'-phosphate
  modified_base 18: mod_base = OTHER; note = 2'-O-methylguanosine-3'-phosphate
  modified_base 19: mod_base = OTHER; note = 2'-O-methyladenosine-3'-phosphate
  modified_base 20: mod_base = OTHER; note = 2'-O-methylguanosine-3'-phosphate
  modified_base 21: mod_base = OTHER; note 2'-O-methyluridine-3'-phosphate-N-[tris(GalNAc-alkyl)-amido decanoyl)]-4-hydroxyprolinol (Hyp-(GalNAc-alkyl)3)
ttccctatggctccttggagt

SEQ ID NO: 5044 - RNA, 21 nt, synthetic construct
  source 1..21: mol_type = other RNA
  modified_base 1: mod_base = OTHER; note = 2'-O-methylguanosine-3'- phosphorothioate
  modified_base 2: mod_base = OTHER; note = 2'-O-methylguanosine-3'- phosphorothioate
  modified_base 3: mod_base = OTHER; note = 2'-O-methylcytidine-3'-phosphate
  modified_base 4: mod_base = OTHER; note = 2'-O-methyluridine-3'-phosphate
  modified_base 5: mod_base = OTHER; note = 2'-O-methylcytidine-3'-phosphate
  modified_base 6: mod_base = OTHER; note = 2'-O-methylcytidine-3'-phosphate
  modified_base 7: mod_base = OTHER; note = 2'-fluorouridine-3'-phosphate
  modified_base 8: mod_base = OTHER; note = 2'-O-methyluridine-3'-phosphate
  modified_base 9: mod_base = OTHER; note = 2'-fluoroguanosine-3'-phosphate
  modified_base 10: mod_base = OTHER; note = 2'-fluoroguanosine-3'-phosphate
  modified_base 11: mod_base = OTHER; note = 2'-fluoroadenosine-3'-phosphate
  modified_base 12: mod_base = OTHER; note = 2'-O-methylguanosine-3'-phosphate
  modified_base 13: mod_base = OTHER; note = 2'-O-methylguanosine-3'-phosphate
  modified_base 14: mod_base = OTHER; note = 2'-O-methyladenosine-3'-phosphate
  modified_base 15: mod_base = OTHER; note = 2'-O-methylguanosine-3'-phosphate
  modified_base 16: mod_base = OTHER; note = 2'-O-methylguanosine-3'-phosphate
  modified_base 17: mod_base = OTHER; note = 2'-O-methyluridine-3'-phosphate
  modified_base 18: mod_base = OTHER; note = 2'-O-methyladenosine-3'-phosphate
  modified_base 19: mod_base = OTHER; note = 2'-O-methyladenosine-3'-phosphate
  modified_base 20: mod_base = OTHER; note = 2'-O-methyluridine-3'-phosphate
  modified_base 21: mod_base = OTHER; note 2'-O-methyluridine-3'-phosphate-N-[tris(GalNAc-alkyl)-amido decanoyl)]-4-hydroxyprolinol (Hyp-(GalNAc-alkyl)3)
ggctccttggaggaggtaatt

SEQ ID NO: 5045 - RNA, 21 nt, synthetic construct
  source 1..21: mol_type = other RNA
  modified_base 1: mod_base = OTHER; note = 2'-O-methyladenosine-3'- phosphorothioate
  modified_base 2: mod_base = OTHER; note = 2'-O-methyluridine-3'-phosphorothioate
  modified_base 3: mod_base = OTHER; note = 2'-O-methylcytidine-3'-phosphate
  modified_base 4: mod_base = OTHER; note = 2'-O-methylcytidine-3'-phosphate
  modified_base 5: mod_base = OTHER; note = 2'-O-methylguanosine-3'-phosphate
  modified_base 6: mod_base = OTHER; note = 2'-O-methylguanosine-3'-phosphate
  modified_base 7: mod_base = OTHER; note = 2'-fluoroadenosine-3'-phosphate
  modified_base 8: mod_base = OTHER; note = 2'-O-methylguanosine-3'-phosphate
  modified_base 9: mod_base = OTHER; note = 2'-fluoroguanosine-3'-phosphate
  modified_base 10: mod_base = OTHER; note = 2'-fluoroguanosine-3'-phosphate
  modified_base 11: mod_base = OTHER; note = 2'-fluorocytidine-3'-phosphate
  modified_base 12: mod_base = OTHER; note = 2'-O-methylcytidine-3'-phosphate
  modified_base 13: mod_base = OTHER; note = 2'-O-methylcytidine-3'-phosphate
  modified_base 14: mod_base = OTHER; note = 2'-O-methyladenosine-3'-phosphate
  modified_base 15: mod_base = OTHER; note = 2'-O-methylguanosine-3'-phosphate
  modified_base 16: mod_base = OTHER; note = 2'-O-methylguanosine-3'-phosphate
  modified_base 17: mod_base = OTHER; note = 2'-O-methyladenosine-3'-phosphate
  modified_base 18: mod_base = OTHER; note = 2'-O-methylguanosine-3'-phosphate
  modified_base 19: mod_base = OTHER; note = 2'-O-methyladenosine-3'-phosphate
  modified_base 20: mod_base = OTHER; note = 2'-O-methyladenosine-3'-phosphate
  modified_base 21: mod_base = OTHER; note 2'-O-methyluridine-3'-phosphate-N-[tris(GalNAc-alkyl)-amido decanoyl)]-4-hydroxyprolinol (Hyp-(GalNAc-alkyl)3)
atccggagggcccaggagaat

SEQ ID NO: 5046 - RNA, 21 nt, synthetic construct
  source 1..21: mol_type = other RNA
  modified_base 1: mod_base = OTHER; note = 2'-O-methylguanosine-3'- phosphorothioate
  modified_base 2: mod_base = OTHER; note = 2'-O-methyladenosine-3'- phosphorothioate
  modified_base 3: mod_base = OTHER; note = 2'-O-methyladenosine-3'-phosphate
  modified_base 4: mod_base = OTHER; note = 2'-O-methylcytidine-3'-phosphate
  modified_base 5: mod_base = OTHER; note = 2'-O-methylcytidine-3'-phosphate
  modified_base 6: mod_base = OTHER; note = 2'-O-methylguanosine-3'-phosphate
  modified_base 7: mod_base = OTHER; note = 2'-fluoroguanosine-3'-phosphate
  modified_base 8: mod_base = OTHER; note = 2'-O-methyladenosine-3'-phosphate
  modified_base 9: mod_base = OTHER; note = 2'-fluoroguanosine-3'-phosphate
  modified_base 10: mod_base = OTHER; note = 2'-fluorocytidine-3'-phosphate
  modified_base 11: mod_base = OTHER; note = 2'-fluoroguanosine-3'-phosphate
  modified_base 12: mod_base = OTHER; note = 2'-O-methyluridine-3'-phosphate
  modified_base 13: mod_base = OTHER; note = 2'-O-methylguanosine-3'-phosphate
  modified_base 14: mod_base = OTHER; note = 2'-O-methylcytidine-3'-phosphate
  modified_base 15: mod_base = OTHER; note = 2'-O-methyluridine-3'-phosphate
  modified_base 16: mod_base = OTHER; note = 2'-O-methyluridine-3'-phosphate
  modified_base 17: mod_base = OTHER; note = 2'-O-methylcytidine-3'-phosphate
  modified_base 18: mod_base = OTHER; note = 2'-O-methyladenosine-3'-phosphate
  modified_base 19: mod_base = OTHER; note = 2'-O-methylguanosine-3'-phosphate
  modified_base 20: mod_base = OTHER; note = 2'-O-methylguanosine-3'-phosphate
  modified_base 21: mod_base = OTHER; note 2'-O-methyluridine-3'-phosphate-N-[tris(GalNAc-alkyl)-amido decanoyl)]-4-hydroxyprolinol (Hyp-(GalNAc-alkyl)3)
gaaccggagcgtgcttcaggt

SEQ ID NO: 5047 - RNA, 21 nt, synthetic construct
  source 1..21: mol_type = other RNA
  modified_base 1: mod_base = OTHER; note = 2'-O-methylcytidine-3'- phosphorothioate
  modified_base 2: mod_base = OTHER; note = 2'-O-methyladenosine-3'- phosphorothioate
  modified_base 3: mod_base = OTHER; note = 2'-O-methylguanosine-3'-phosphate
  modified_base 4: mod_base = OTHER; note = 2'-O-methylguanosine-3'-phosphate
  modified_base 5: mod_base = OTHER; note = 2'-O-methylguanosine-3'-phosphate
  modified_base 6: mod_base = OTHER; note = 2'-O-methyluridine-3'-phosphate
  modified_base 7: mod_base = OTHER; note = 2'-fluoroguanosine-3'-phosphate
  modified_base 8: mod_base = OTHER; note = 2'-O-methylcytidine-3'-phosphate
  modified_base 9: mod_base = OTHER; note = 2'-fluorocytidine-3'-phosphate
  modified_base 10: mod_base = OTHER; note = 2'-fluorocytidine-3'-phosphate
  modified_base 11: mod_base = OTHER; note = 2'-fluoroguanosine-3'-phosphate
  modified_base 12: mod_base = OTHER; note = 2'-O-methylcytidine-3'-phosphate
  modified_base 13: mod_base = OTHER; note = 2'-O-methyladenosine-3'-phosphate
  modified_base 14: mod_base = OTHER; note = 2'-O-methylguanosine-3'-phosphate
  modified_base 15: mod_base = OTHER; note = 2'-O-methylguanosine-3'-phosphate
  modified_base 16: mod_base = OTHER; note = 2'-O-methylguanosine-3'-phosphate
  modified_base 17: mod_base = OTHER; note = 2'-O-methyladenosine-3'-phosphate
  modified_base 18: mod_base = OTHER; note = 2'-O-methyladenosine-3'-phosphate
  modified_base 19: mod_base = OTHER; note = 2'-O-methylcytidine-3'-phosphate
  modified_base 20: mod_base = OTHER; note = 2'-O-methyladenosine-3'-phosphate
  modified_base 21: mod_base = OTHER; note 2'-O-methyluridine-3'-phosphate-N-[tris(GalNAc-alkyl)-amido decanoyl)]-4-hydroxyprolinol (Hyp-(GalNAc-alkyl)3)
cagggtgcccgcagggaacat

SEQ ID NO: 5048 - RNA, 21 nt, synthetic construct
  source 1..21: mol_type = other RNA
  modified_base 1: mod_base = OTHER; note = 2'-O-methylcytidine-3'- phosphorothioate
  modified_base 2: mod_base = OTHER; note = 2'-O-methyladenosine-3'- phosphorothioate
  modified_base 3: mod_base = OTHER; note = 2'-O-methylguanosine-3'-phosphate
  modified_base 4: mod_base = OTHER; note = 2'-O-methylguanosine-3'-phosphate
  modified_base 5: mod_base = OTHER; note = 2'-O-methylguanosine-3'-phosphate
  modified_base 6: mod_base = OTHER; note = 2'-O-methyladenosine-3'-phosphate
  modified_base 7: mod_base = OTHER; note = 2'-fluoroadenosine-3'-phosphate
  modified_base 8: mod_base = OTHER; note = 2'-O-methylcytidine-3'-phosphate
  modified_base 9: mod_base = OTHER; note = 2'-fluoroadenosine-3'-phosphate
  modified_base 10: mod_base = OTHER; note = 2'-fluoroguanosine-3'-phosphate
  modified_base 11: mod_base = OTHER; note = 2'-fluoroguanosine-3'-phosphate
  modified_base 12: mod_base = OTHER; note = 2'-O-methyladenosine-3'-phosphate
  modified_base 13: mod_base = OTHER; note = 2'-O-methylguanosine-3'-phosphate
  modified_base 14: mod_base = OTHER; note = 2'-O-methylcytidine-3'-phosphate
  modified_base 15: mod_base = OTHER; note = 2'-O-methyluridine-3'-phosphate
  modified_base 16: mod_base = OTHER; note = 2'-O-methylguanosine-3'-phosphate
  modified_base 17: mod_base = OTHER; note = 2'-O-methylcytidine-3'-phosphate
  modified_base 18: mod_base = OTHER; note = 2'-O-methyluridine-3'-phosphate
  modified_base 19: mod_base = OTHER; note = 2'-O-methylcytidine-3'-phosphate
  modified_base 20: mod_base = OTHER; note = 2'-O-methyladenosine-3'-phosphate
  modified_base 21: mod_base = OTHER; note 2'-O-methyluridine-3'-phosphate-N-[tris(GalNAc-alkyl)-amido decanoyl)]-4-hydroxyprolinol (Hyp-(GalNAc-alkyl)3)
cagggaacaggagctgctcat

SEQ ID NO: 5049 - RNA, 21 nt, synthetic construct
  source 1..21: mol_type = other RNA
  modified_base 1: mod_base = OTHER; note = 2'-O-methyladenosine-3'- phosphorothioate
  modified_base 2: mod_base = OTHER; note = 2'-O-methyladenosine-3'- phosphorothioate
  modified_base 3: mod_base = OTHER; note = 2'-O-methylcytidine-3'-phosphate
  modified_base 4: mod_base = OTHER; note = 2'-O-methyladenosine-3'-phosphate
  modified_base 5: mod_base = OTHER; note = 2'-O-methylguanosine-3'-phosphate
  modified_base 6: mod_base = OTHER; note = 2'-O-methylguanosine-3'-phosphate
  modified_base 7: mod_base = OTHER; note = 2'-fluoroadenosine-3'-phosphate
  modified_base 8: mod_base = OTHER; note = 2'-O-methylguanosine-3'-phosphate
  modified_base 9: mod_base = OTHER; note = 2'-fluorocytidine-3'-phosphate
  modified_base 10: mod_base = OTHER; note = 2'-fluorouridine-3'-phosphate
  modified_base 11: mod_base = OTHER; note = 2'-fluoroguanosine-3'-phosphate
  modified_base 12: mod_base = OTHER; note = 2'-O-methylcytidine-3'-phosphate
  modified_base 13: mod_base = OTHER; note = 2'-O-methyluridine-3'-phosphate
  modified_base 14: mod_base = OTHER; note = 2'-O-methylcytidine-3'-phosphate
  modified_base 15: mod_base = OTHER; note = 2'-O-methyladenosine-3'-phosphate
  modified_base 16: mod_base = OTHER; note = 2'-O-methylguanosine-3'-phosphate
  modified_base 17: mod_base = OTHER; note = 2'-O-methylcytidine-3'-phosphate
  modified_base 18: mod_base = OTHER; note = 2'-O-methylcytidine-3'-phosphate
  modified_base 19: mod_base = OTHER; note = 2'-O-methyladenosine-3'-phosphate
  modified_base 20: mod_base = OTHER; note = 2'-O-methyladenosine-3'-phosphate
  modified_base 21: mod_base = OTHER; note 2'-O-methyluridine-3'-phosphate-N-[tris(GalNAc-alkyl)-amido decanoyl)]-4-hydroxyprolinol (Hyp-(GalNAc-alkyl)3)
aacaggagctgctcagccaat

SEQ ID NO: 5050 - RNA, 21 nt, synthetic construct
  source 1..21: mol_type = other RNA
  modified_base 1: mod_base = OTHER; note = 2'-O-methylguanosine-3'- phosphorothioate
  modified_base 2: mod_base = OTHER; note = 2'-O-methyladenosine-3'- phosphorothioate
  modified_base 3: mod_base = OTHER; note = 2'-O-methylguanosine-3'-phosphate
  modified_base 4: mod_base = OTHER; note = 2'-O-methylcytidine-3'-phosphate
  modified_base 5: mod_base = OTHER; note = 2'-O-methyluridine-3'-phosphate
  modified_base 6: mod_base = OTHER; note = 2'-O-methylguanosine-3'-phosphate
  modified_base 7: mod_base = OTHER; note = 2'-fluorocytidine-3'-phosphate
  modified_base 8: mod_base = OTHER; note = 2'-O-methyluridine-3'-phosphate
  modified_base 9: mod_base = OTHER; note = 2'-fluorocytidine-3'-phosphate
  modified_base 10: mod_base = OTHER; note = 2'-fluoroadenosine-3'-phosphate
  modified_base 11: mod_base = OTHER; note = 2'-fluoroguanosine-3'-phosphate
  modified_base 12: mod_base = OTHER; note = 2'-O-methylcytidine-3'-phosphate
  modified_base 13: mod_base = OTHER; note = 2'-O-methylcytidine-3'-phosphate
  modified_base 14: mod_base = OTHER; note = 2'-O-methyladenosine-3'-phosphate
  modified_base 15: mod_base = OTHER; note = 2'-O-methyladenosine-3'-phosphate
  modified_base 16: mod_base = OTHER; note = 2'-O-methylguanosine-3'-phosphate
  modified_base 17: mod_base = OTHER; note = 2'-O-methyladenosine-3'-phosphate
  modified_base 18: mod_base = OTHER; note = 2'-O-methyladenosine-3'-phosphate
  modified_base 19: mod_base = OTHER; note = 2'-O-methylcytidine-3'-phosphate
  modified_base 20: mod_base = OTHER; note = 2'-O-methyluridine-3'-phosphate
  modified_base 21: mod_base = OTHER; note 2'-O-methyluridine-3'-phosphate-N-[tris(GalNAc-alkyl)-amido decanoyl)]-4-hydroxyprolinol (Hyp-(GalNAc-alkyl)3)
gagctgctcagccaagaactt

SEQ ID NO: 5051 - RNA, 21 nt, synthetic construct
  source 1..21: mol_type = other RNA
  modified_base 1: mod_base = OTHER; note = 2'-O-methylguanosine-3'- phosphorothioate
  modified_base 2: mod_base = OTHER; note = 2'-O-methylcytidine-3'- phosphorothioate
  modified_base 3: mod_base = OTHER; note = 2'-O-methyluridine-3'-phosphate
  modified_base 4: mod_base = OTHER; note = 2'-O-methylcytidine-3'-phosphate
  modified_base 5: mod_base = OTHER; note = 2'-O-methyladenosine-3'-phosphate
  modified_base 6: mod_base = OTHER; note = 2'-O-methylguanosine-3'-phosphate
  modified_base 7: mod_base = OTHER; note = 2'-fluorocytidine-3'-phosphate
  modified_base 8: mod_base = OTHER; note = 2'-O-methylcytidine-3'-phosphate
  modified_base 9: mod_base = OTHER; note = 2'-fluoroadenosine-3'-phosphate
  modified_base 10: mod_base = OTHER; note = 2'-fluoroadenosine-3'-phosphate
  modified_base 11: mod_base = OTHER; note = 2'-fluoroguanosine-3'-phosphate
  modified_base 12: mod_base = OTHER; note = 2'-O-methyladenosine-3'-phosphate
  modified_base 13: mod_base = OTHER; note = 2'-O-methyladenosine-3'-phosphate
  modified_base 14: mod_base = OTHER; note = 2'-O-methylcytidine-3'-phosphate
  modified_base 15: mod_base = OTHER; note = 2'-O-methyluridine-3'-phosphate
  modified_base 16: mod_base = OTHER; note = 2'-O-methylguanosine-3'-phosphate
  modified_base 17: mod_base = OTHER; note = 2'-O-methyluridine-3'-phosphate
  modified_base 18: mod_base = OTHER; note = 2'-O-methylguanosine-3'-phosphate
  modified_base 19: mod_base = OTHER; note = 2'-O-methylguanosine-3'-phosphate
  modified_base 20: mod_base = OTHER; note = 2'-O-methylcytidine-3'-phosphate
  modified_base 21: mod_base = OTHER; note 2'-O-methyluridine-3'-phosphate-N-[tris(GalNAc-alkyl)-amido decanoyl)]-4-hydroxyprolinol (Hyp-(GalNAc-alkyl)3)
gctcagccaagaactgtggct

SEQ ID NO: 5052 - RNA, 21 nt, synthetic construct
  source 1..21: mol_type = other RNA
  modified_base 1: mod_base = OTHER; note = 2'-O-methyluridine-3'-phosphorothioate
  modified_base 2: mod_base = OTHER; note = 2'-O-methylguanosine-3'- phosphorothioate
  modified_base 3: mod_base = OTHER; note = 2'-O-methylcytidine-3'-phosphate
  modified_base 4: mod_base = OTHER; note = 2'-O-methylcytidine-3'-phosphate
  modified_base 5: mod_base = OTHER; note = 2'-O-methyladenosine-3'-phosphate
  modified_base 6: mod_base = OTHER; note = 2'-O-methylguanosine-3'-phosphate
  modified_base 7: mod_base = OTHER; note = 2'-fluoroguanosine-3'-phosphate
  modified_base 8: mod_base = OTHER; note = 2'-O-methyladenosine-3'-phosphate
  modified_base 9: mod_base = OTHER; note = 2'-fluorouridine-3'-phosphate
  modified_base 10: mod_base = OTHER; note = 2'-fluoroguanosine-3'-phosphate
  modified_base 11: mod_base = OTHER; note = 2'-fluorocytidine-3'-phosphate
  modified_base 12: mod_base = OTHER; note = 2'-O-methylcytidine-3'-phosphate
  modified_base 13: mod_base = OTHER; note = 2'-O-methylguanosine-3'-phosphate
  modified_base 14: mod_base = OTHER; note = 2'-O-methyladenosine-3'-phosphate
  modified_base 15: mod_base = OTHER; note = 2'-O-methyladenosine-3'-phosphate
  modified_base 16: mod_base = OTHER; note = 2'-O-methylguanosine-3'-phosphate
  modified_base 17: mod_base = OTHER; note = 2'-O-methylguanosine-3'-phosphate
  modified_base 18: mod_base = OTHER; note = 2'-O-methyladenosine-3'-phosphate
  modified_base 19: mod_base = OTHER; note = 2'-O-methyluridine-3'-phosphate
  modified_base 20: mod_base = OTHER; note = 2'-O-methyladenosine-3'-phosphate
  modified_base 21: mod_base = OTHER; note 2'-O-methyluridine-3'-phosphate-N-[tris(GalNAc-alkyl)-amido decanoyl)]-4-hydroxyprolinol (Hyp-(GalNAc-alkyl)3)
tgccaggatgccgaaggatat

SEQ ID NO: 5053 - RNA, 21 nt, synthetic construct
  source 1..21: mol_type = other RNA
  modified_base 1: mod_base = OTHER; note = 2'-O-methyluridine-3'-phosphorothioate
  modified_base 2: mod_base = OTHER; note = 2'-O-methylcytidine-3'- phosphorothioate
  modified_base 3: mod_base = OTHER; note = 2'-O-methyladenosine-3'-phosphate
  modified_base 4: mod_base = OTHER; note = 2'-O-methyluridine-3'-phosphate
  modified_base 5: mod_base = OTHER; note = 2'-O-methylguanosine-3'-phosphate
  modified_base 6: mod_base = OTHER; note = 2'-O-methyluridine-3'-phosphate
  modified_base 7: mod_base = OTHER; note = 2'-fluoroguanosine-3'-phosphate
  modified_base 8: mod_base = OTHER; note = 2'-O-methylguanosine-3'-phosphate
  modified_base 9: mod_base = OTHER; note = 2'-fluorouridine-3'-phosphate
  modified_base 10: mod_base = OTHER; note = 2'-fluorocytidine-3'-phosphate
  modified_base 11: mod_base = OTHER; note = 2'-fluoroadenosine-3'-phosphate
  modified_base 12: mod_base = OTHER; note = 2'-O-methyladenosine-3'-phosphate
  modified_base 13: mod_base = OTHER; note = 2'-O-methyluridine-3'-phosphate
  modified_base 14: mod_base = OTHER; note = 2'-O-methyladenosine-3'-phosphate
  modified_base 15: mod_base = OTHER; note = 2'-O-methyladenosine-3'-phosphate
  modified_base 16: mod_base = OTHER; note = 2'-O-methyladenosine-3'-phosphate
  modified_base 17: mod_base = OTHER; note = 2'-O-methyladenosine-3'-phosphate
  modified_base 18: mod_base = OTHER; note = 2'-O-methylguanosine-3'-phosphate
  modified_base 19: mod_base = OTHER; note = 2'-O-methyluridine-3'-phosphate
  modified_base 20: mod_base = OTHER; note = 2'-O-methylcytidine-3'-phosphate
  modified_base 21: mod_base = OTHER; note 2'-O-methyluridine-3'-phosphate-N-[tris(GalNAc-alkyl)-amido decanoyl)]-4-hydroxyprolinol (Hyp-(GalNAc-alkyl)3)
tcatgtggtcaataaaagtct

SEQ ID NO: 5054 - RNA, 21 nt, synthetic construct
  source 1..21: mol_type = other RNA
  modified_base 1: mod_base = OTHER; note = 2'-O-methyluridine-3'-phosphorothioate
  modified_base 2: mod_base = OTHER; note = 2'-O-methylcytidine-3'- phosphorothioate
  modified_base 3: mod_base = OTHER; note = 2'-O-methyladenosine-3'-phosphate
  modified_base 4: mod_base = OTHER; note = 2'-O-methyladenosine-3'-phosphate
  modified_base 5: mod_base = OTHER; note = 2'-O-methyluridine-3'-phosphate
  modified_base 6: mod_base = OTHER; note = 2'-O-methyladenosine-3'-phosphate
  modified_base 7: mod_base = OTHER; note = 2'-fluoroadenosine-3'-phosphate
  modified_base 8: mod_base = OTHER; note = 2'-O-methyladenosine-3'-phosphate
  modified_base 9: mod_base = OTHER; note = 2'-fluoroadenosine-3'-phosphate
  modified_base 10: mod_base = OTHER; note = 2'-fluoroguanosine-3'-phosphate
  modified_base 11: mod_base = OTHER; note = 2'-fluorouridine-3'-phosphate
  modified_base 12: mod_base = OTHER; note = 2'-O-methylcytidine-3'-phosphate
  modified_base 13: mod_base = OTHER; note = 2'-O-methylcytidine-3'-phosphate
  modified_base 14: mod_base = OTHER; note = 2'-O-methyluridine-3'-phosphate
  modified_base 15: mod_base = OTHER; note = 2'-O-methyluridine-3'-phosphate
  modified_base 16: mod_base = OTHER; note = 2'-O-methyladenosine-3'-phosphate
  modified_base 17: mod_base = OTHER; note = 2'-O-methylguanosine-3'-phosphate
  modified_base 18: mod_base = OTHER; note = 2'-O-methylguanosine-3'-phosphate
  modified_base 19: mod_base = OTHER; note = 2'-O-methyluridine-3'-phosphate
  modified_base 20: mod_base = OTHER; note = 2'-O-methylguanosine-3'-phosphate
  modified_base 21: mod_base = OTHER; note 2'-O-methyluridine-3'-phosphate-N-[tris(GalNAc-alkyl)-amido decanoyl)]-4-hydroxyprolinol (Hyp-(GalNAc-alkyl)3)
tcaataaaagtccttaggtgt

SEQ ID NO: 5055 - RNA, 21 nt, synthetic construct
  source 1..21: mol_type = other RNA
  modified_base 1: mod_base = OTHER; note = 2'-O-methyladenosine-3'- phosphorothioate
  modified_base 2: mod_base = OTHER; note = 2'-O-methyladenosine-3'- phosphorothioate
  modified_base 3: mod_base = OTHER; note = 2'-O-methyladenosine-3'-phosphate
  modified_base 4: mod_base = OTHER; note = 2'-O-methyladenosine-3'-phosphate
  modified_base 5: mod_base = OTHER; note = 2'-O-methylguanosine-3'-phosphate
  modified_base 6: mod_base = OTHER; note = 2'-O-methyluridine-3'-phosphate
  modified_base 7: mod_base = OTHER; note = 2'-fluorocytidine-3'-phosphate
  modified_base 8: mod_base = OTHER; note = 2'-O-methylcytidine-3'-phosphate
  modified_base 9: mod_base = OTHER; note = 2'-fluorouridine-3'-phosphate
  modified_base 10: mod_base = OTHER; note = 2'-fluorouridine-3'-phosphate
  modified_base 11: mod_base = OTHER; note = 2'-fluoroadenosine-3'-phosphate
  modified_base 12: mod_base = OTHER; note = 2'-O-methylguanosine-3'-phosphate
  modified_base 13: mod_base = OTHER; note = 2'-O-methylguanosine-3'-phosphate
  modified_base 14: mod_base = OTHER; note = 2'-O-methyluridine-3'-phosphate
  modified_base 15: mod_base = OTHER; note = 2'-O-methylguanosine-3'-phosphate
  modified_base 16: mod_base = OTHER; note = 2'-O-methylcytidine-3'-phosphate
  modified_base 17: mod_base = OTHER; note = 2'-O-methyluridine-3'-phosphate
  modified_base 18: mod_base = OTHER; note = 2'-O-methylguanosine-3'-phosphate
  modified_base 19: mod_base = OTHER; note = 2'-O-methylcytidine-3'-phosphate
  modified_base 20: mod_base = OTHER; note = 2'-O-methylcytidine-3'-phosphate
  modified_base 21: mod_base = OTHER; note 2'-O-methyluridine-3'-phosphate-N-[tris(GalNAc-alkyl)-amido decanoyl)]-4-hydroxyprolinol (Hyp-(GalNAc-alkyl)3)
aaaagtccttaggtgctgcct

SEQ ID NO: 5056 - RNA, 23 nt, synthetic construct
  source 1..23: mol_type = other RNA
  modified_base 1: mod_base = OTHER; note = 2'-O-methyladenosine-3'- phosphorothioate
  modified_base 2: mod_base = OTHER; note = 2'-fluorouridine -3'-phosphorothioate
  modified_base 3: mod_base = OTHER; note = 2'-O-methylcytidine-3'-phosphate
  modified_base 4: mod_base = OTHER; note = 2'-O-methylcytidine-3'-phosphate
  modified_base 5: mod_base = OTHER; note = 2'-O-methyladenosine-3'-phosphate
  modified_base 6: mod_base = OTHER; note = 2'-fluorocytidine-3'-phosphate
  modified_base 7: mod_base = OTHER; note = 2'-O-methyladenosine-3'-phosphate
  modified_base 8: mod_base = OTHER; note = 2'-fluorocytidine-3'-phosphate
  modified_base 9: mod_base = OTHER; note = 2'-fluorocytidine-3'-phosphate
  modified_base 10: mod_base = OTHER; note = 2'-O-methyladenosine-3'-phosphate
  modified_base 11: mod_base = OTHER; note = 2'-O-methylguanosine-3'-phosphate
  modified_base 12: mod_base = OTHER; note = 2'-O-methylguanosine-3'-phosphate
  modified_base 13: mod_base = OTHER; note = 2'-O-methylguanosine-3'-phosphate
  modified_base 14: mod_base = OTHER; note = 2'-fluoroadenosine-3'-phosphate
  modified_base 15: mod_base = OTHER; note = 2'-O-methyladenosine-3'-phosphate
  modified_base 16: mod_base = OTHER; note = 2'-fluoroguanosine-3'-phosphate
  modified_base 17: mod_base = OTHER; note = 2'-O-methylguanosine-3'-phosphate
  modified_base 18: mod_base = OTHER; note = 2'-O-methyluridine-3'-phosphate
  modified_base 19: mod_base = OTHER; note = 2'-O-methyluridine-3'-phosphate
  modified_base 20: mod_base = OTHER; note = 2'-O-methylcytidine-3'-phosphate
  modified_base 21: mod_base = OTHER; note = 2'-O-methyluridine-3'-phosphorothioate
  modified_base 22: mod_base = OTHER; note = 2'-O-methylcytidine-3'- phosphorothioate
  modified_base 23: mod_base = OTHER; note = 2'-O-methyluridine-3'-phosphate
atccacaccagggaaggttctct

SEQ ID NO: 5057 - RNA, 23 nt, synthetic construct
  source 1..23: mol_type = other RNA
  modified_base 1: mod_base = OTHER; note = 2'-O-methyladenosine-3'- phosphorothioate
  modified_base 2: mod_base = OTHER; note = 2'-fluorocytidine-3'-phosphorothioate
  modified_base 3: mod_base = OTHER; note = 2'-O-methyluridine-3'-phosphate
  modified_base 4: mod_base = OTHER; note = 2'-O-methylguanosine-3'-phosphate
  modified_base 5: mod_base = OTHER; note = 2'-O-methylcytidine-3'-phosphate
  modified_base 6: mod_base = OTHER; note = 2'-fluorocytidine-3'-phosphate
  modified_base 7: mod_base = OTHER; note = 2'-O-methyluridine-3'-phosphate
  modified_base 8: mod_base = OTHER; note = 2'-fluorocytidine-3'-phosphate
  modified_base 9: mod_base = OTHER; note = 2'-fluorocytidine-3'-phosphate
  modified_base 10: mod_base = OTHER; note = 2'-O-methyladenosine-3'-phosphate
  modified_base 11: mod_base = OTHER; note = 2'-O-methylcytidine-3'-phosphate
  modified_base 12: mod_base = OTHER; note = 2'-O-methyladenosine-3'-phosphate
  modified_base 13: mod_base = OTHER; note = 2'-O-methylcytidine-3'-phosphate
  modified_base 14: mod_base = OTHER; note = 2'-fluorocytidine-3'-phosphate
  modified_base 15: mod_base = OTHER; note = 2'-O-methyladenosine-3'-phosphate
  modified_base 16: mod_base = OTHER; note = 2'-fluoroguanosine-3'-phosphate
  modified_base 17: mod_base = OTHER; note = 2'-O-methylguanosine-3'-phosphate
  modified_base 18: mod_base = OTHER; note = 2'-O-methylguanosine-3'-phosphate
  modified_base 19: mod_base = OTHER; note = 2'-O-methyladenosine-3'-phosphate
  modified_base 20: mod_base = OTHER; note = 2'-O-methyladenosine-3'-phosphate
  modified_base 21: mod_base = OTHER; note = 2'-O-methylguanosine-3'- phosphorothioate
  modified_base 22: mod_base = OTHER; note = 2'-O-methylguanosine-3'- phosphorothioate
  modified_base 23: mod_base = OTHER; note = 2'-O-methyluridine-3'-phosphate
actgcctccacaccagggaaggt

SEQ ID NO: 5058 - RNA, 23 nt, synthetic construct
  source 1..23: mol_type = other RNA
  modified_base 1: mod_base = OTHER; note = 2'-O-methyladenosine-3'- phosphorothioate
  modified_base 2: mod_base = OTHER; note = 2'-fluoroadenosine-3'-phosphorothioate
  modified_base 3: mod_base = OTHER; note = 2'-O-methyladenosine-3'-phosphate
  modified_base 4: mod_base = OTHER; note = 2'-O-methylcytidine-3'-phosphate
  modified_base 5: mod_base = OTHER; note = 2'-O-methyladenosine-3'-phosphate
  modified_base 6: mod_base = OTHER; note = 2'-fluoroguanosine-3'-phosphate
  modified_base 7: mod_base = OTHER; note = 2'-O-methylguanosine-3'-phosphate
  modified_base 8: mod_base = OTHER; note = 2'-fluorouridine-3'-phosphate
  modified_base 9: mod_base = OTHER; note = 2'-fluorocytidine-3'-phosphate
  modified_base 10: mod_base = OTHER; note = 2'-O-methylcytidine-3'-phosphate
  modified_base 11: mod_base = OTHER; note = 2'-O-methylguanosine-3'-phosphate
  modified_base 12: mod_base = OTHER; note = 2'-O-methylguanosine-3'-phosphate
  modified_base 13: mod_base = OTHER; note = 2'-O-methyladenosine-3'-phosphate
  modified_base 14: mod_base = OTHER; note = 2'-fluoroguanosine-3'-phosphate
  modified_base 15: mod_base = OTHER; note = 2'-O-methylcytidine-3'-phosphate
  modified_base 16: mod_base = OTHER; note = 2'-fluoroadenosine-3'-phosphate
  modified_base 17: mod_base = OTHER; note = 2'-O-methyluridine-3'-phosphate
  modified_base 18: mod_base = OTHER; note = 2'-O-methylcytidine-3'-phosphate
  modified_base 19: mod_base = OTHER; note = 2'-O-methylcytidine-3'-phosphate
  modified_base 20: mod_base = OTHER; note = 2'-O-methyluridine-3'-phosphate
  modified_base 21: mod_base = OTHER; note = 2'-O-methylguanosine-3'- phosphorothioate
  modified_base 22: mod_base = OTHER; note = 2'-O-methylguanosine-3'- phosphorothioate
  modified_base 23: mod_base = OTHER; note = 2'-O-methylguanosine-3'-phosphate
aaacaggtccggagcatcctggg

SEQ ID NO: 5059 - RNA, 23 nt, synthetic construct
  source 1..23: mol_type = other RNA
  modified_base 1: mod_base = OTHER; note = 2'-O-methyladenosine-3'- phosphorothioate
  modified_base 2: mod_base = OTHER; note = 2'-fluorocytidine-3'-phosphorothioate
  modified_base 3: mod_base = OTHER; note = 2'-O-methyladenosine-3'-phosphate
  modified_base 4: mod_base = OTHER; note = 2'-O-methylcytidine-3'-phosphate
  modified_base 5: mod_base = OTHER; note = 2'-O-methylguanosine-3'-phosphate
  modified_base 6: mod_base = OTHER; note = 2'-fluorouridine-3'-phosphate
  modified_base 7: mod_base = OTHER; note = 2'-O-methyladenosine-3'-phosphate
  modified_base 8: mod_base = OTHER; note = 2'-fluoroadenosine-3'-phosphate
  modified_base 9: mod_base = OTHER; note = 2'-fluorocytidine-3'-phosphate
  modified_base 10: mod_base = OTHER; note = 2'-O-methyladenosine-3'-phosphate
  modified_base 11: mod_base = OTHER; note = 2'-O-methylguanosine-3'-phosphate
  modified_base 12: mod_base = OTHER; note = 2'-O-methylguanosine-3'-phosphate
  modified_base 13: mod_base = OTHER; note = 2'-O-methyluridine-3'-phosphate
  modified_base 14: mod_base = OTHER; note = 2'-fluorocytidine-3'-phosphate
  modified_base 15: mod_base = OTHER; note = 2'-O-methylcytidine-3'-phosphate
  modified_base 16: mod_base = OTHER; note = 2'-fluoroguanosine-3'-phosphate
  modified_base 17: mod_base = OTHER; note = 2'-O-methylguanosine-3'-phosphate
  modified_base 18: mod_base = OTHER; note = 2'-O-methyladenosine-3'-phosphate
  modified_base 19: mod_base = OTHER; note = 2'-O-methylguanosine-3'-phosphate
  modified_base 20: mod_base = OTHER; note = 2'-O-methylcytidine-3'-phosphate
  modified_base 21: mod_base = OTHER; note = 2'-O-methyladenosine-3'- phosphorothioate
  modified_base 22: mod_base = OTHER; note = 2'-O-methyluridine-3'-phosphorothioate
  modified_base 23: mod_base = OTHER; note = 2'-O-methylcytidine-3'-phosphate
acacgtaacaggtccggagcatc

SEQ ID NO: 5060 - RNA, 23 nt, synthetic construct
  source 1..23: mol_type = other RNA
  modified_base 1: mod_base = OTHER; note = 2'-O-methyladenosine-3'- phosphorothioate
  modified_base 2: mod_base = OTHER; note = 2'-fluoroadenosine-3'-phosphorothioate
  modified_base 3: mod_base = OTHER; note = 2'-O-methyladenosine-3'-phosphate
  modified_base 4: mod_base = OTHER; note = 2'-O-methylcytidine-3'-phosphate
  modified_base 5: mod_base = OTHER; note = 2'-O-methyladenosine-3'-phosphate
  modified_base 6: mod_base = OTHER; note = 2'-fluoroguanosine-3'-phosphate
  modified_base 7: mod_base = OTHER; note = 2'-O-methyladenosine-3'-phosphate
  modified_base 8: mod_base = OTHER; note = 2'-fluoroguanosine-3'-phosphate
  modified_base 9: mod_base = OTHER; note = 2'-fluorocytidine-3'-phosphate
  modified_base 10: mod_base = OTHER; note = 2'-O-methyladenosine-3'-phosphate
  modified_base 11: mod_base = OTHER; note = 2'-O-methylcytidine-3'-phosphate
  modified_base 12: mod_base = OTHER; note = 2'-O-methylguanosine-3'-phosphate
  modified_base 13: mod_base = OTHER; note = 2'-O-methyluridine-3'-phosphate
  modified_base 14: mod_base = OTHER; note = 2'-fluoroadenosine-3'-phosphate
  modified_base 15: mod_base = OTHER; note = 2'-O-methyladenosine-3'-phosphate
  modified_base 16: mod_base = OTHER; note = 2'-fluorocytidine-3'-phosphate
  modified_base 17: mod_base = OTHER; note = 2'-O-methyladenosine-3'-phosphate
  modified_base 18: mod_base = OTHER; note = 2'-O-methylguanosine-3'-phosphate
  modified_base 19: mod_base = OTHER; note = 2'-O-methylguanosine-3'-phosphate
  modified_base 20: mod_base = OTHER; note = 2'-O-methyluridine-3'-phosphate
  modified_base 21: mod_base = OTHER; note = 2'-O-methylcytidine-3'- phosphorothioate
  modified_base 22: mod_base = OTHER; note = 2'-O-methylcytidine-3'- phosphorothioate
  modified_base 23: mod_base = OTHER; note = 2'-O-methylguanosine-3'-phosphate
aaacagagcacgtaacaggtccg

SEQ ID NO: 5061 - RNA, 23 nt, synthetic construct
  source 1..23: mol_type = other RNA
  modified_base 1: mod_base = OTHER; note = 2'-O-methyladenosine-3'- phosphorothioate
  modified_base 2: mod_base = OTHER; note = 2'-fluoroguanosine-3'-phosphorothioate
  modified_base 3: mod_base = OTHER; note = 2'-O-methylcytidine-3'-phosphate
  modified_base 4: mod_base = OTHER; note = 2'-O-methyluridine-3'-phosphate
  modified_base 5: mod_base = OTHER; note = 2'-O-methyluridine-3'-phosphate
  modified_base 6: mod_base = OTHER; note = 2'-fluoroguanosine-3'-phosphate
  modified_base 7: mod_base = OTHER; note = 2'-O-methylguanosine-3'-phosphate
  modified_base 8: mod_base = OTHER; note = 2'-fluoroguanosine-3'-phosphate
  modified_base 9: mod_base = OTHER; note = 2'-fluoroadenosine-3'-phosphate
  modified_base 10: mod_base = OTHER; note = 2'-O-methyladenosine-3'-phosphate
  modified_base 11: mod_base = OTHER; note = 2'-O-methylcytidine-3'-phosphate
  modified_base 12: mod_base = OTHER; note = 2'-O-methyladenosine-3'-phosphate
  modified_base 13: mod_base = OTHER; note = 2'-O-methylguanosine-3'-phosphate
  modified_base 14: mod_base = OTHER; note = 2'-fluoroadenosine-3'-phosphate
  modified_base 15: mod_base = OTHER; note = 2'-O-methylguanosine-3'-phosphate
  modified_base 16: mod_base = OTHER; note = 2'-fluorocytidine-3'-phosphate
  modified_base 17: mod_base = OTHER; note = 2'-O-methyladenosine-3'-phosphate
  modified_base 18: mod_base = OTHER; note = 2'-O-methylcytidine-3'-phosphate
  modified_base 19: mod_base = OTHER; note = 2'-O-methylguanosine-3'-phosphate
  modified_base 20: mod_base = OTHER; note = 2'-O-methyluridine-3'-phosphate
  modified_base 21: mod_base = OTHER; note = 2'-O-methyladenosine-3'- phosphorothioate
  modified_base 22: mod_base = OTHER; note = 2'-O-methyladenosine-3'- phosphorothioate
  modified_base 23: mod_base = OTHER; note = 2'-O-methylcytidine-3'-phosphate
agcttgggaacagagcacgtaac

SEQ ID NO: 5062 - RNA, 23 nt, synthetic construct
  source 1..23: mol_type = other RNA
  modified_base 1: mod_base = OTHER; note = 2'-O-methyladenosine-3'- phosphorothioate
  modified_base 2: mod_base = OTHER; note = 2'-fluoroguanosine-3'-phosphorothioate
  modified_base 3: mod_base = OTHER; note = 2'-O-methyladenosine-3'-phosphate
  modified_base 4: mod_base = OTHER; note = 2'-O-methylcytidine-3'-phosphate
  modified_base 5: mod_base = OTHER; note = 2'-O-methylcytidine-3'-phosphate
  modified_base 6: mod_base = OTHER; note = 2'-fluoroadenosine-3'-phosphate
  modified_base 7: mod_base = OTHER; note = 2'-O-methylguanosine-3'-phosphate
  modified_base 8: mod_base = OTHER; note = 2'-fluorocytidine-3'-phosphate
  modified_base 9: mod_base = OTHER; note = 2'-fluorouridine-3'-phosphate
  modified_base 10: mod_base = OTHER; note = 2'-O-methyluridine-3'-phosphate
  modified_base 11: mod_base = OTHER; note = 2'-O-methylguanosine-3'-phosphate
  modified_base 12: mod_base = OTHER; note = 2'-O-methylguanosine-3'-phosphate
  modified_base 13: mod_base = OTHER; note = 2'-O-methylguanosine-3'-phosphate
  modified_base 14: mod_base = OTHER; note = 2'-fluoroadenosine-3'-phosphate
  modified_base 15: mod_base = OTHER; note = 2'-O-methyladenosine-3'-phosphate
  modified_base 16: mod_base = OTHER; note = 2'-fluorocytidine-3'-phosphate
  modified_base 17: mod_base = OTHER; note = 2'-O-methyladenosine-3'-phosphate
  modified_base 18: mod_base = OTHER; note = 2'-O-methylguanosine-3'-phosphate
  modified_base 19: mod_base = OTHER; note = 2'-O-methyladenosine-3'-phosphate
  modified_base 20: mod_base = OTHER; note = 2'-O-methylguanosine-3'-phosphate
  modified_base 21: mod_base = OTHER; note = 2'-O-methylcytidine-3'- phosphorothioate
  modified_base 22: mod_base = OTHER; note = 2'-O-methyladenosine-3'- phosphorothioate
  modified_base 23: mod_base = OTHER; note = 2'-O-methylcytidine-3'-phosphate
agaccagcttgggaacagagcac

SEQ ID NO: 5063 - RNA, 23 nt, synthetic construct
  source 1..23: mol_type = other RNA
  modified_base 1: mod_base = OTHER; note = 2'-O-methyladenosine-3'- phosphorothioate
  modified_base 2: mod_base = OTHER; note = 2'-fluorocytidine-3'-phosphorothioate
  modified_base 3: mod_base = OTHER; note = 2'-O-methyladenosine-3'-phosphate
  modified_base 4: mod_base = OTHER; note = 2'-O-methyladenosine-3'-phosphate
  modified_base 5: mod_base = OTHER; note = 2'-O-methyladenosine-3'-phosphate
  modified_base 6: mod_base = OTHER; note = 2'-fluoroguanosine-3'-phosphate
  modified_base 7: mod_base = OTHER; note = 2'-O-methylcytidine-3'-phosphate
  modified_base 8: mod_base = OTHER; note = 2'-fluorouridine-3'-phosphate
  modified_base 9: mod_base = OTHER; note = 2'-fluorocytidine-3'-phosphate
  modified_base 10: mod_base = OTHER; note = 2'-O-methyladenosine-3'-phosphate
  modified_base 11: mod_base = OTHER; note = 2'-O-methylguanosine-3'-phosphate
  modified_base 12: mod_base = OTHER; note = 2'-O-methylguanosine-3'-phosphate
  modified_base 13: mod_base = OTHER; note = 2'-O-methylguanosine-3'-phosphate
  modified_base 14: mod_base = OTHER; note = 2'-fluoroadenosine-3'-phosphate
  modified_base 15: mod_base = OTHER; note = 2'-O-methylcytidine-3'-phosphate
  modified_base 16: mod_base = OTHER; note = 2'-fluorouridine-3'-phosphate
  modified_base 17: mod_base = OTHER; note = 2'-O-methylguanosine-3'-phosphate
  modified_base 18: mod_base = OTHER; note = 2'-O-methylcytidine-3'-phosphate
  modified_base 19: mod_base = OTHER; note = 2'-O-methylcytidine-3'-phosphate
  modified_base 20: mod_base = OTHER; note = 2'-O-methyladenosine-3'-phosphate
  modified_base 21: mod_base = OTHER; note = 2'-O-methylguanosine-3'- phosphorothioate
  modified_base 22: mod_base = OTHER; note = 2'-O-methylcytidine-3'- phosphorothioate
  modified_base 23: mod_base = OTHER; note = 2'-O-methylcytidine-3'-phosphate
acaaagctcagggactgccagcc

SEQ ID NO: 5064 - RNA, 23 nt, synthetic construct
  source 1..23: mol_type = other RNA
  modified_base 1: mod_base = OTHER; note = 2'-O-methyladenosine-3'- phosphorothioate
  modified_base 2: mod_base = OTHER; note = 2'-fluorocytidine-3'-phosphorothioate
  modified_base 3: mod_base = OTHER; note = 2'-O-methylguanosine-3'-phosphate
  modified_base 4: mod_base = OTHER; note = 2'-O-methylcytidine-3'-phosphate
  modified_base 5: mod_base = OTHER; note = 2'-O-methylcytidine-3'-phosphate
  modified_base 6: mod_base = OTHER; note = 2'-fluoroadenosine-3'-phosphate
  modified_base 7: mod_base = OTHER; note = 2'-O-methyluridine-3'-phosphate
  modified_base 8: mod_base = OTHER; note = 2'-fluorocytidine-3'-phosphate
  modified_base 9: mod_base = OTHER; note = 2'-fluoroadenosine-3'-phosphate
  modified_base 10: mod_base = OTHER; note = 2'-O-methyladenosine-3'-phosphate
  modified_base 11: mod_base = OTHER; note = 2'-O-methyladenosine-3'-phosphate
  modified_base 12: mod_base = OTHER; note = 2'-O-methylguanosine-3'-phosphate
  modified_base 13: mod_base = OTHER; note = 2'-O-methylcytidine-3'-phosphate
  modified_base 14: mod_base = OTHER; note = 2'-fluorouridine-3'-phosphate
  modified_base 15: mod_base = OTHER; note = 2'-O-methylcytidine-3'-phosphate
  modified_base 16: mod_base = OTHER; note = 2'-fluoroadenosine-3'-phosphate
  modified_base 17: mod_base = OTHER; note = 2'-O-methylguanosine-3'-phosphate
  modified_base 18: mod_base = OTHER; note = 2'-O-methylguanosine-3'-phosphate
  modified_base 19: mod_base = OTHER; note = 2'-O-methylguanosine-3'-phosphate
  modified_base 20: mod_base = OTHER; note = 2'-O-methyladenosine-3'-phosphate
  modified_base 21: mod_base = OTHER; note = 2'-O-methylcytidine-3'- phosphorothioate
  modified_base 22: mod_base = OTHER; note = 2'-O-methyluridine-3'-phosphorothioate
  modified_base 23: mod_base = OTHER; note = 2'-O-methylguanosine-3'-phosphate
acgccatcaaagctcagggactg

SEQ ID NO: 5065 - RNA, 23 nt, synthetic construct
  source 1..23: mol_type = other RNA
  modified_base 1: mod_base = OTHER; note = 2'-O-methyladenosine-3'- phosphorothioate
  modified_base 2: mod_base = OTHER; note = 2'-fluoroguanosine-3'-phosphorothioate
  modified_base 3: mod_base = OTHER; note = 2'-O-methyluridine-3'-phosphate
  modified_base 4: mod_base = OTHER; note = 2'-O-methylguanosine-3'-phosphate
  modified_base 5: mod_base = OTHER; note = 2'-O-methylcytidine-3'-phosphate
  modified_base 6: mod_base = OTHER; note = 2'-fluorocytidine-3'-phosphate
  modified_base 7: mod_base = OTHER; note = 2'-O-methylcytidine-3'-phosphate
  modified_base 8: mod_base = OTHER; note = 2'-fluorouridine-3'-phosphate
  modified_base 9: mod_base = OTHER; note = 2'-fluorouridine-3'-phosphate
  modified_base 10: mod_base = OTHER; note = 2'-O-methyladenosine-3'-phosphate
  modified_base 11: mod_base = OTHER; note = 2'-O-methyladenosine-3'-phosphate
  modified_base 12: mod_base = OTHER; note = 2'-O-methylguanosine-3'-phosphate
  modified_base 13: mod_base = OTHER; note = 2'-O-methylguanosine-3'-phosphate
  modified_base 14: mod_base = OTHER; note = 2'-fluorouridine-3'-phosphate
  modified_base 15: mod_base = OTHER; note = 2'-O-methylguanosine-3'-phosphate
  modified_base 16: mod_base = OTHER; note = 2'-fluoroguanosine-3'-phosphate
  modified_base 17: mod_base = OTHER; note = 2'-O-methyladenosine-3'-phosphate
  modified_base 18: mod_base = OTHER; note = 2'-O-methyladenosine-3'-phosphate
  modified_base 19: mod_base = OTHER; note = 2'-O-methylguanosine-3'-phosphate
  modified_base 20: mod_base = OTHER; note = 2'-O-methylguanosine-3'-phosphate
  modified_base 21: mod_base = OTHER; note = 2'-O-methylcytidine-3'- phosphorothioate
  modified_base 22: mod_base = OTHER; note = 2'-O-methylcytidine-3'- phosphorothioate
  modified_base 23: mod_base = OTHER; note = 2'-O-methylcytidine-3'-phosphate
agtgcccttaaggtggaaggccc

SEQ ID NO: 5066 - RNA, 23 nt, synthetic construct
  source 1..23: mol_type = other RNA
  modified_base 1: mod_base = OTHER; note = 2'-O-methyladenosine-3'- phosphorothioate
  modified_base 2: mod_base = OTHER; note = 2'-fluorouridine -3'-phosphorothioate
  modified_base 3: mod_base = OTHER; note = 2'-O-methylcytidine-3'-phosphate
  modified_base 4: mod_base = OTHER; note = 2'-O-methyluridine-3'-phosphate
  modified_base 5: mod_base = OTHER; note = 2'-O-methylcytidine-3'-phosphate
  modified_base 6: mod_base = OTHER; note = 2'-fluorocytidine-3'-phosphate
  modified_base 7: mod_base = OTHER; note = 2'-O-methyluridine-3'-phosphate
  modified_base 8: mod_base = OTHER; note = 2'-fluoroguanosine-3'-phosphate
  modified_base 9: mod_base = OTHER; note = 2'-fluorouridine-3'-phosphate
  modified_base 10: mod_base = OTHER; note = 2'-O-methylguanosine-3'-phosphate
  modified_base 11: mod_base = OTHER; note = 2'-O-methylcytidine-3'-phosphate
  modified_base 12: mod_base = OTHER; note = 2'-O-methylcytidine-3'-phosphate
  modified_base 13: mod_base = OTHER; note = 2'-O-methylcytidine-3'-phosphate
  modified_base 14: mod_base = OTHER; note = 2'-fluorouridine-3'-phosphate
  modified_base 15: mod_base = OTHER; note = 2'-O-methyluridine-3'-phosphate
  modified_base 16: mod_base = OTHER; note = 2'-fluoroadenosine-3'-phosphate
  modified_base 17: mod_base = OTHER; note = 2'-O-methyladenosine-3'-phosphate
  modified_base 18: mod_base = OTHER; note = 2'-O-methylguanosine-3'-phosphate
  modified_base 19: mod_base = OTHER; note = 2'-O-methylguanosine-3'-phosphate
  modified_base 20: mod_base = OTHER; note = 2'-O-methyluridine-3'-phosphate
  modified_base 21: mod_base = OTHER; note = 2'-O-methylguanosine-3'- phosphorothioate
  modified_base 22: mod_base = OTHER; note = 2'-O-methylguanosine-3'- phosphorothioate
  modified_base 23: mod_base = OTHER; note = 2'-O-methyladenosine-3'-phosphate
atctcctgtgcccttaaggtgga

SEQ ID NO: 5067 - RNA, 23 nt, synthetic construct
  source 1..23: mol_type = other RNA
  modified_base 1: mod_base = OTHER; note = 2'-O-methyladenosine-3'- phosphorothioate
  modified_base 2: mod_base = OTHER; note = 2'-fluoroguanosine-3'-phosphorothioate
  modified_base 3: mod_base = OTHER; note = 2'-O-methyluridine-3'-phosphate
  modified_base 4: mod_base = OTHER; note = 2'-O-methylguanosine-3'-phosphate
  modified_base 5: mod_base = OTHER; note = 2'-O-methyluridine-3'-phosphate
  modified_base 6: mod_base = OTHER; note = 2'-fluorocytidine-3'-phosphate
  modified_base 7: mod_base = OTHER; note = 2'-O-methyladenosine-3'-phosphate
  modified_base 8: mod_base = OTHER; note = 2'-fluoroguanosine-3'-phosphate
  modified_base 9: mod_base = OTHER; note = 2'-fluorocytidine-3'-phosphate
  modified_base 10: mod_base = OTHER; note = 2'-O-methyluridine-3'-phosphate
  modified_base 11: mod_base = OTHER; note = 2'-O-methylcytidine-3'-phosphate
  modified_base 12: mod_base = OTHER; note = 2'-O-methyluridine-3'-phosphate
  modified_base 13: mod_base = OTHER; note = 2'-O-methylcytidine-3'-phosphate
  modified_base 14: mod_base = OTHER; note = 2'-fluorocytidine-3'-phosphate
  modified_base 15: mod_base = OTHER; note = 2'-O-methyluridine-3'-phosphate
  modified_base 16: mod_base = OTHER; note = 2'-fluoroguanosine-3'-phosphate
  modified_base 17: mod_base = OTHER; note = 2'-O-methyluridine-3'-phosphate
  modified_base 18: mod_base = OTHER; note = 2'-O-methylguanosine-3'-phosphate
  modified_base 19: mod_base = OTHER; note = 2'-O-methylcytidine-3'-phosphate
  modified_base 20: mod_base = OTHER; note = 2'-O-methylcytidine-3'-phosphate
  modified_base 21: mod_base = OTHER; note = 2'-O-methylcytidine-3'- phosphorothioate
  modified_base 22: mod_base = OTHER; note = 2'-O-methyluridine-3'-phosphorothioate
  modified_base 23: mod_base = OTHER; note = 2'-O-methyluridine-3'-phosphate
agtgtcagctctcctgtgccctt

SEQ ID NO: 5068 - RNA, 23 nt, synthetic construct
  source 1..23: mol_type = other RNA
  modified_base 1: mod_base = OTHER; note = 2'-O-methyladenosine-3'- phosphorothioate
  modified_base 2: mod_base = OTHER; note = 2'-fluoroadenosine-3'-phosphorothioate
  modified_base 3: mod_base = OTHER; note = 2'-O-methyladenosine-3'-phosphate
  modified_base 4: mod_base = OTHER; note = 2'-O-methylguanosine-3'-phosphate
  modified_base 5: mod_base = OTHER; note = 2'-O-methylguanosine-3'-phosphate
  modified_base 6: mod_base = OTHER; note = 2'-fluorocytidine-3'-phosphate
  modified_base 7: mod_base = OTHER; note = 2'-O-methylcytidine-3'-phosphate
  modified_base 8: mod_base = OTHER; note = 2'-fluorocytidine-3'-phosphate
  modified_base 9: mod_base = OTHER; note = 2'-fluoroguanosine-3'-phosphate
  modified_base 10: mod_base = OTHER; note = 2'-O-methyluridine-3'-phosphate
  modified_base 11: mod_base = OTHER; note = 2'-O-methylguanosine-3'-phosphate
  modified_base 12: mod_base = OTHER; note = 2'-O-methyluridine-3'-phosphate
  modified_base 13: mod_base = OTHER; note = 2'-O-methylcytidine-3'-phosphate
  modified_base 14: mod_base = OTHER; note = 2'-fluoroadenosine-3'-phosphate
  modified_base 15: mod_base = OTHER; note = 2'-O-methylguanosine-3'-phosphate
  modified_base 16: mod_base = OTHER; note = 2'-fluorocytidine-3'-phosphate
  modified_base 17: mod_base = OTHER; note = 2'-O-methyluridine-3'-phosphate
  modified_base 18: mod_base = OTHER; note = 2'-O-methylcytidine-3'-phosphate
  modified_base 19: mod_base = OTHER; note = 2'-O-methyluridine-3'-phosphate
  modified_base 20: mod_base = OTHER; note = 2'-O-methylcytidine-3'-phosphate
  modified_base 21: mod_base = OTHER; note = 2'-O-methylcytidine-3'- phosphorothioate
  modified_base 22: mod_base = OTHER; note = 2'-O-methyluridine-3'-phosphorothioate
  modified_base 23: mod_base = OTHER; note = 2'-O-methylguanosine-3'-phosphate
aaaggcccgtgtcagctctcctg

SEQ ID NO: 5069 - RNA, 23 nt, synthetic construct
  source 1..23: mol_type = other RNA
  modified_base 1: mod_base = OTHER; note = 2'-O-methyladenosine-3'- phosphorothioate
  modified_base 2: mod_base = OTHER; note = 2'-fluoroguanosine-3'-phosphorothioate
  modified_base 3: mod_base = OTHER; note = 2'-O-methyladenosine-3'-phosphate
  modified_base 4: mod_base = OTHER; note = 2'-O-methyladenosine-3'-phosphate
  modified_base 5: mod_base = OTHER; note = 2'-O-methylcytidine-3'-phosphate
  modified_base 6: mod_base = OTHER; note = 2'-fluorocytidine-3'-phosphate
  modified_base 7: mod_base = OTHER; note = 2'-O-methyladenosine-3'-phosphate
  modified_base 8: mod_base = OTHER; note = 2'-fluoroguanosine-3'-phosphate
  modified_base 9: mod_base = OTHER; note = 2'-fluorocytidine-3'-phosphate
  modified_base 10: mod_base = OTHER; note = 2'-O-methyladenosine-3'-phosphate
  modified_base 11: mod_base = OTHER; note = 2'-O-methyladenosine-3'-phosphate
  modified_base 12: mod_base = OTHER; note = 2'-O-methylguanosine-3'-phosphate
  modified_base 13: mod_base = OTHER; note = 2'-O-methylguanosine-3'-phosphate
  modified_base 14: mod_base = OTHER; note = 2'-fluorocytidine-3'-phosphate
  modified_base 15: mod_base = OTHER; note = 2'-O-methylcytidine-3'-phosphate
  modified_base 16: mod_base = OTHER; note = 2'-fluorocytidine-3'-phosphate
  modified_base 17: mod_base = OTHER; note = 2'-O-methylguanosine-3'-phosphate
  modified_base 18: mod_base = OTHER; note = 2'-O-methyluridine-3'-phosphate
  modified_base 19: mod_base = OTHER; note = 2'-O-methylguanosine-3'-phosphate
  modified_base 20: mod_base = OTHER; note = 2'-O-methyluridine-3'-phosphate
  modified_base 21: mod_base = OTHER; note = 2'-O-methylcytidine-3'- phosphorothioate
  modified_base 22: mod_base = OTHER; note = 2'-O-methyladenosine-3'- phosphorothioate
  modified_base 23: mod_base = OTHER; note = 2'-O-methylguanosine-3'-phosphate
agaaccagcaaggcccgtgtcag

SEQ ID NO: 5070 - RNA, 23 nt, synthetic construct
  source 1..23: mol_type = other RNA
  modified_base 1: mod_base = OTHER; note = 2'-O-methyladenosine-3'- phosphorothioate
  modified_base 2: mod_base = OTHER; note = 2'-fluoroadenosine-3'-phosphorothioate
  modified_base 3: mod_base = OTHER; note = 2'-O-methylcytidine-3'-phosphate
  modified_base 4: mod_base = OTHER; note = 2'-O-methyladenosine-3'-phosphate
  modified_base 5: mod_base = OTHER; note = 2'-O-methylguanosine-3'-phosphate
  modified_base 6: mod_base = OTHER; note = 2'-fluorocytidine-3'-phosphate
  modified_base 7: mod_base = OTHER; note = 2'-O-methylcytidine-3'-phosphate
  modified_base 8: mod_base = OTHER; note = 2'-fluoroguanosine-3'-phosphate
  modified_base 9: mod_base = OTHER; note = 2'-fluoroguanosine-3'-phosphate
  modified_base 10: mod_base = OTHER; note = 2'-O-methyladenosine-3'-phosphate
  modified_base 11: mod_base = OTHER; note = 2'-O-methylguanosine-3'-phosphate
  modified_base 12: mod_base = OTHER; note = 2'-O-methyladenosine-3'-phosphate
  modified_base 13: mod_base = OTHER; note = 2'-O-methyladenosine-3'-phosphate
  modified_base 14: mod_base = OTHER; note = 2'-fluorocytidine-3'-phosphate
  modified_base 15: mod_base = OTHER; note = 2'-O-methylcytidine-3'-phosphate
  modified_base 16: mod_base = OTHER; note = 2'-fluoroadenosine-3'-phosphate
  modified_base 17: mod_base = OTHER; note = 2'-O-methylguanosine-3'-phosphate
  modified_base 18: mod_base = OTHER; note = 2'-O-methylcytidine-3'-phosphate
  modified_base 19: mod_base = OTHER; note = 2'-O-methyladenosine-3'-phosphate
  modified_base 20: mod_base = OTHER; note = 2'-O-methyladenosine-3'-phosphate
  modified_base 21: mod_base = OTHER; note = 2'-O-methylguanosine-3'- phosphorothioate
  modified_base 22: mod_base = OTHER; note = 2'-O-methylguanosine-3'- phosphorothioate
  modified_base 23: mod_base = OTHER; note = 2'-O-methylcytidine-3'-phosphate
aacagccggagaaccagcaaggc

SEQ ID NO: 5071 - RNA, 23 nt, synthetic construct
  source 1..23: mol_type = other RNA
  modified_base 1: mod_base = OTHER; note = 2'-O-methyladenosine-3'- phosphorothioate
  modified_base 2: mod_base = OTHER; note = 2'-fluoroadenosine-3'-phosphorothioate
  modified_base 3: mod_base = OTHER; note = 2'-O-methylguanosine-3'-phosphate
  modified_base 4: mod_base = OTHER; note = 2'-O-methylguanosine-3'-phosphate
  modified_base 5: mod_base = OTHER; note = 2'-O-methylcytidine-3'-phosphate
  modified_base 6: mod_base = OTHER; note = 2'-fluoroadenosine-3'-phosphate
  modified_base 7: mod_base = OTHER; note = 2'-O-methylcytidine-3'-phosphate
  modified_base 8: mod_base = OTHER; note = 2'-fluoroadenosine-3'-phosphate
  modified_base 9: mod_base = OTHER; note = 2'-fluorocytidine-3'-phosphate
  modified_base 10: mod_base = OTHER; note = 2'-O-methyladenosine-3'-phosphate
  modified_base 11: mod_base = OTHER; note = 2'-O-methylguanosine-3'-phosphate
  modified_base 12: mod_base = OTHER; note = 2'-O-methylcytidine-3'-phosphate
  modified_base 13: mod_base = OTHER; note = 2'-O-methylcytidine-3'-phosphate
  modified_base 14: mod_base = OTHER; note = 2'-fluoroguanosine-3'-phosphate
  modified_base 15: mod_base = OTHER; note = 2'-O-methylguanosine-3'-phosphate
  modified_base 16: mod_base = OTHER; note = 2'-fluoroadenosine-3'-phosphate
  modified_base 17: mod_base = OTHER; note = 2'-O-methylguanosine-3'-phosphate
  modified_base 18: mod_base = OTHER; note = 2'-O-methyladenosine-3'-phosphate
  modified_base 19: mod_base = OTHER; note = 2'-O-methyladenosine-3'-phosphate
  modified_base 20: mod_base = OTHER; note = 2'-O-methylcytidine-3'-phosphate
  modified_base 21: mod_base = OTHER; note = 2'-O-methylcytidine-3'- phosphorothioate
  modified_base 22: mod_base = OTHER; note = 2'-O-methyladenosine-3'- phosphorothioate
  modified_base 23: mod_base = OTHER; note = 2'-O-methylguanosine-3'-phosphate
aaggcacacagccggagaaccag

SEQ ID NO: 5072 - RNA, 23 nt, synthetic construct
  source 1..23: mol_type = other RNA
  modified_base 1: mod_base = OTHER; note = 2'-O-methyladenosine-3'- phosphorothioate
  modified_base 2: mod_base = OTHER; note = 2'-fluoroadenosine-3'-phosphorothioate
  modified_base 3: mod_base = OTHER; note = 2'-O-methyladenosine-3'-phosphate
  modified_base 4: mod_base = OTHER; note = 2'-O-methylcytidine-3'-phosphate
  modified_base 5: mod_base = OTHER; note = 2'-O-methyladenosine-3'-phosphate
  modified_base 6: mod_base = OTHER; note = 2'-fluoroguanosine-3'-phosphate
  modified_base 7: mod_base = OTHER; note = 2'-O-methylcytidine-3'-phosphate
  modified_base 8: mod_base = OTHER; note = 2'-fluorocytidine-3'-phosphate
  modified_base 9: mod_base = OTHER; note = 2'-fluorocytidine-3'-phosphate
  modified_base 10: mod_base = OTHER; note = 2'-O-methylguanosine-3'-phosphate
  modified_base 11: mod_base = OTHER; note = 2'-O-methyluridine-3'-phosphate
  modified_base 12: mod_base = OTHER; note = 2'-O-methylguanosine-3'-phosphate
  modified_base 13: mod_base = OTHER; note = 2'-O-methyladenosine-3'-phosphate
  modified_base 14: mod_base = OTHER; note = 2'-fluoroguanosine-3'-phosphate
  modified_base 15: mod_base = OTHER; note = 2'-O-methyluridine-3'-phosphate
  modified_base 16: mod_base = OTHER; note = 2'-fluoroguanosine-3'-phosphate
  modified_base 17: mod_base = OTHER; note = 2'-O-methyladenosine-3'-phosphate
  modified_base 18: mod_base = OTHER; note = 2'-O-methylcytidine-3'-phosphate
  modified_base 19: mod_base = OTHER; note = 2'-O-methylguanosine-3'-phosphate
  modified_base 20: mod_base = OTHER; note = 2'-O-methyladenosine-3'-phosphate
  modified_base 21: mod_base = OTHER; note = 2'-O-methylguanosine-3'- phosphorothioate
  modified_base 22: mod_base = OTHER; note = 2'-O-methyluridine-3'-phosphorothioate
  modified_base 23: mod_base = OTHER; note = 2'-O-methylguanosine-3'-phosphate
aaacagcccgtgagtgacgagtg

SEQ ID NO: 5073 - RNA, 23 nt, synthetic construct
  source 1..23: mol_type = other RNA
  modified_base 1: mod_base = OTHER; note = 2'-O-methyladenosine-3'- phosphorothioate
  modified_base 2: mod_base = OTHER; note = 2'-fluorocytidine-3'-phosphorothioate
  modified_base 3: mod_base = OTHER; note = 2'-O-methyluridine-3'-phosphate
  modified_base 4: mod_base = OTHER; note = 2'-O-methylguanosine-3'-phosphate
  modified_base 5: mod_base = OTHER; note = 2'-O-methylguanosine-3'-phosphate
  modified_base 6: mod_base = OTHER; note = 2'-fluoroadenosine-3'-phosphate
  modified_base 7: mod_base = OTHER; note = 2'-O-methylguanosine-3'-phosphate
  modified_base 8: mod_base = OTHER; note = 2'-fluorocytidine-3'-phosphate
  modified_base 9: mod_base = OTHER; note = 2'-fluoroadenosine-3'-phosphate
  modified_base 10: mod_base = OTHER; note = 2'-O-methyladenosine-3'-phosphate
  modified_base 11: mod_base = OTHER; note = 2'-O-methylcytidine-3'-phosphate
  modified_base 12: mod_base = OTHER; note = 2'-O-methyladenosine-3'-phosphate
  modified_base 13: mod_base = OTHER; note = 2'-O-methylguanosine-3'-phosphate
  modified_base 14: mod_base = OTHER; note = 2'-fluorocytidine-3'-phosphate
  modified_base 15: mod_base = OTHER; note = 2'-O-methylcytidine-3'-phosphate
  modified_base 16: mod_base = OTHER; note = 2'-fluorocytidine-3'-phosphate
  modified_base 17: mod_base = OTHER; note = 2'-O-methylguanosine-3'-phosphate
  modified_base 18: mod_base = OTHER; note = 2'-O-methyluridine-3'-phosphate
  modified_base 19: mod_base = OTHER; note = 2'-O-methylguanosine-3'-phosphate
  modified_base 20: mod_base = OTHER; note = 2'-O-methyladenosine-3'-phosphate
  modified_base 21: mod_base = OTHER; note = 2'-O-methylguanosine-3'- phosphorothioate
  modified_base 22: mod_base = OTHER; note = 2'-O-methyluridine-3'-phosphorothioate
  modified_base 23: mod_base = OTHER; note = 2'-O-methylguanosine-3'-phosphate
actggagcaacagcccgtgagtg

SEQ ID NO: 5074 - RNA, 23 nt, synthetic construct
  source 1..23: mol_type = other RNA
  modified_base 1: mod_base = OTHER; note = 2'-O-methyladenosine-3'- phosphorothioate
  modified_base 2: mod_base = OTHER; note = 2'-fluorocytidine-3'-phosphorothioate
  modified_base 3: mod_base = OTHER; note = 2'-O-methylguanosine-3'-phosphate
  modified_base 4: mod_base = OTHER; note = 2'-O-methyladenosine-3'-phosphate
  modified_base 5: mod_base = OTHER; note = 2'-O-methylguanosine-3'-phosphate
  modified_base 6: mod_base = OTHER; note = 2'-fluoroadenosine-3'-phosphate
  modified_base 7: mod_base = OTHER; note = 2'-O-methylcytidine-3'-phosphate
  modified_base 8: mod_base = OTHER; note = 2'-fluorocytidine-3'-phosphate
  modified_base 9: mod_base = OTHER; note = 2'-fluoroadenosine-3'-phosphate
  modified_base 10: mod_base = OTHER; note = 2'-O-methylguanosine-3'-phosphate
  modified_base 11: mod_base = OTHER; note = 2'-O-methylguanosine-3'-phosphate
  modified_base 12: mod_base = OTHER; note = 2'-O-methylcytidine-3'-phosphate
  modified_base 13: mod_base = OTHER; note = 2'-O-methylcytidine-3'-phosphate
  modified_base 14: mod_base = OTHER; note = 2'-fluorouridine-3'-phosphate
  modified_base 15: mod_base = OTHER; note = 2'-O-methylguanosine-3'-phosphate
  modified_base 16: mod_base = OTHER; note = 2'-fluoroguanosine-3'-phosphate
  modified_base 17: mod_base = OTHER; note = 2'-O-methyladenosine-3'-phosphate
  modified_base 18: mod_base = OTHER; note = 2'-O-methylguanosine-3'-phosphate
  modified_base 19: mod_base = OTHER; note = 2'-O-methylcytidine-3'-phosphate
  modified_base 20: mod_base = OTHER; note = 2'-O-methyladenosine-3'-phosphate
  modified_base 21: mod_base = OTHER; note = 2'-O-methyladenosine-3'- phosphorothioate
  modified_base 22: mod_base = OTHER; note = 2'-O-methylcytidine-3'- phosphorothioate
  modified_base 23: mod_base = OTHER; note = 2'-O-methyladenosine-3'-phosphate
acgagaccaggcctggagcaaca

SEQ ID NO: 5075 - RNA, 23 nt, synthetic construct
  source 1..23: mol_type = other RNA
  modified_base 1: mod_base = OTHER; note = 2'-O-methyladenosine-3'- phosphorothioate
  modified_base 2: mod_base = OTHER; note = 2'-fluoroguanosine-3'-phosphorothioate
  modified_base 3: mod_base = OTHER; note = 2'-O-methyladenosine-3'-phosphate
  modified_base 4: mod_base = OTHER; note = 2'-O-methylguanosine-3'-phosphate
  modified_base 5: mod_base = OTHER; note = 2'-O-methyladenosine-3'-phosphate
  modified_base 6: mod_base = OTHER; note = 2'-fluoroadenosine-3'-phosphate
  modified_base 7: mod_base = OTHER; note = 2'-O-methyladenosine-3'-phosphate
  modified_base 8: mod_base = OTHER; note = 2'-fluorouridine-3'-phosphate
  modified_base 9: mod_base = OTHER; note = 2'-fluoroguanosine-3'-phosphate
  modified_base 10: mod_base = OTHER; note = 2'-O-methylcytidine-3'-phosphate
  modified_base 11: mod_base = OTHER; note = 2'-O-methylguanosine-3'-phosphate
  modified_base 12: mod_base = OTHER; note = 2'-O-methylcytidine-3'-phosphate
  modified_base 13: mod_base = OTHER; note = 2'-O-methylcytidine-3'-phosphate
  modified_base 14: mod_base = OTHER; note = 2'-fluorouridine-3'-phosphate
  modified_base 15: mod_base = OTHER; note = 2'-O-methylguanosine-3'-phosphate
  modified_base 16: mod_base = OTHER; note = 2'-fluoroadenosine-3'-phosphate
  modified_base 17: mod_base = OTHER; note = 2'-O-methylguanosine-3'-phosphate
  modified_base 18: mod_base = OTHER; note = 2'-O-methyladenosine-3'-phosphate
  modified_base 19: mod_base = OTHER; note = 2'-O-methylguanosine-3'-phosphate
  modified_base 20: mod_base = OTHER; note = 2'-O-methylcytidine-3'-phosphate
  modified_base 21: mod_base = OTHER; note = 2'-O-methylcytidine-3'- phosphorothioate
  modified_base 22: mod_base = OTHER; note = 2'-O-methylguanosine-3'- phosphorothioate
  modified_base 23: mod_base = OTHER; note = 2'-O-methylguanosine-3'-phosphate
agagaaatgcgcctgagagccgg

SEQ ID NO: 5076 - RNA, 23 nt, synthetic construct
  source 1..23: mol_type = other RNA
  modified_base 1: mod_base = OTHER; note = 2'-O-methyladenosine-3'- phosphorothioate
  modified_base 2: mod_base = OTHER; note = 2'-fluoroguanosine-3'-phosphorothioate
  modified_base 3: mod_base = OTHER; note = 2'-O-methylcytidine-3'-phosphate
  modified_base 4: mod_base = OTHER; note = 2'-O-methyluridine-3'-phosphate
  modified_base 5: mod_base = OTHER; note = 2'-O-methylcytidine-3'-phosphate
  modified_base 6: mod_base = OTHER; note = 2'-fluoroguanosine-3'-phosphate
  modified_base 7: mod_base = OTHER; note = 2'-O-methylguanosine-3'-phosphate
  modified_base 8: mod_base = OTHER; note = 2'-fluoroadenosine-3'-phosphate
  modified_base 9: mod_base = OTHER; note = 2'-fluoroguanosine-3'-phosphate
  modified_base 10: mod_base = OTHER; note = 2'-O-methyladenosine-3'-phosphate
  modified_base 11: mod_base = OTHER; note = 2'-O-methyladenosine-3'-phosphate
  modified_base 12: mod_base = OTHER; note = 2'-O-methyladenosine-3'-phosphate
  modified_base 13: mod_base = OTHER; note = 2'-O-methyluridine-3'-phosphate
  modified_base 14: mod_base = OTHER; note = 2'-fluoroguanosine-3'-phosphate
  modified_base 15: mod_base = OTHER; note = 2'-O-methylcytidine-3'-phosphate
  modified_base 16: mod_base = OTHER; note = 2'-fluoroguanosine-3'-phosphate
  modified_base 17: mod_base = OTHER; note = 2'-O-methylcytidine-3'-phosphate
  modified_base 18: mod_base = OTHER; note = 2'-O-methylcytidine-3'-phosphate
  modified_base 19: mod_base = OTHER; note = 2'-O-methyluridine-3'-phosphate
  modified_base 20: mod_base = OTHER; note = 2'-O-methylguanosine-3'-phosphate
  modified_base 21: mod_base = OTHER; note = 2'-O-methyladenosine-3'- phosphorothioate
  modified_base 22: mod_base = OTHER; note = 2'-O-methylguanosine-3'- phosphorothioate
  modified_base 23: mod_base = OTHER; note = 2'-O-methyladenosine-3'-phosphate
agctcggagaaatgcgcctgaga

SEQ ID NO: 5077 - RNA, 23 nt, synthetic construct
  source 1..23: mol_type = other RNA
  modified_base 1: mod_base = OTHER; note = 2'-O-methyladenosine-3'- phosphorothioate
  modified_base 2: mod_base = OTHER; note = 2'-fluorocytidine-3'-phosphorothioate
  modified_base 3: mod_base = OTHER; note = 2'-O-methylguanosine-3'-phosphate
  modified_base 4: mod_base = OTHER; note = 2'-O-methylguanosine-3'-phosphate
  modified_base 5: mod_base = OTHER; note = 2'-O-methyladenosine-3'-phosphate
  modified_base 6: mod_base = OTHER; note = 2'-fluorouridine-3'-phosphate
  modified_base 7: mod_base = OTHER; note = 2'-O-methylguanosine-3'-phosphate
  modified_base 8: mod_base = OTHER; note = 2'-fluorocytidine-3'-phosphate
  modified_base 9: mod_base = OTHER; note = 2'-fluorouridine-3'-phosphate
  modified_base 10: mod_base = OTHER; note = 2'-O-methylcytidine-3'-phosphate
  modified_base 11: mod_base = OTHER; note = 2'-O-methylguanosine-3'-phosphate
  modified_base 12: mod_base = OTHER; note = 2'-O-methylguanosine-3'-phosphate
  modified_base 13: mod_base = OTHER; note = 2'-O-methyladenosine-3'-phosphate
  modified_base 14: mod_base = OTHER; note = 2'-fluoroguanosine-3'-phosphate
  modified_base 15: mod_base = OTHER; note = 2'-O-methyladenosine-3'-phosphate
  modified_base 16: mod_base = OTHER; note = 2'-fluoroadenosine-3'-phosphate
  modified_base 17: mod_base = OTHER; note = 2'-O-methyladenosine-3'-phosphate
  modified_base 18: mod_base = OTHER; note = 2'-O-methyluridine-3'-phosphate
  modified_base 19: mod_base = OTHER; note = 2'-O-methylguanosine-3'-phosphate
  modified_base 20: mod_base = OTHER; note = 2'-O-methylcytidine-3'-phosphate
  modified_base 21: mod_base = OTHER; note = 2'-O-methylguanosine-3'- phosphorothioate
  modified_base 22: mod_base = OTHER; note = 2'-O-methylcytidine-3'- phosphorothioate
  modified_base 23: mod_base = OTHER; note = 2'-O-methylcytidine-3'-phosphate
acggatgctcggagaaatgcgcc

SEQ ID NO: 5078 - RNA, 23 nt, synthetic construct
  source 1..23: mol_type = other RNA
  modified_base 1: mod_base = OTHER; note = 2'-O-methyladenosine-3'- phosphorothioate
  modified_base 2: mod_base = OTHER; note = 2'-fluoroadenosine-3'-phosphorothioate
  modified_base 3: mod_base = OTHER; note = 2'-O-methyluridine-3'-phosphate
  modified_base 4: mod_base = OTHER; note = 2'-O-methyladenosine-3'-phosphate
  modified_base 5: mod_base = OTHER; note = 2'-O-methylguanosine-3'-phosphate
  modified_base 6: mod_base = OTHER; note = 2'-fluoroadenosine-3'-phosphate
  modified_base 7: mod_base = OTHER; note = 2'-O-methylcytidine-3'-phosphate
  modified_base 8: mod_base = OTHER; note = 2'-fluoroguanosine-3'-phosphate
  modified_base 9: mod_base = OTHER; note = 2'-fluoroguanosine-3'-phosphate
  modified_base 10: mod_base = OTHER; note = 2'-O-methyladenosine-3'-phosphate
  modified_base 11: mod_base = OTHER; note = 2'-O-methyluridine-3'-phosphate
  modified_base 12: mod_base = OTHER; note = 2'-O-methylguanosine-3'-phosphate
  modified_base 13: mod_base = OTHER; note = 2'-O-methylcytidine-3'-phosphate
  modified_base 14: mod_base = OTHER; note = 2'-fluorouridine-3'-phosphate
  modified_base 15: mod_base = OTHER; note = 2'-O-methylcytidine-3'-phosphate
  modified_base 16: mod_base = OTHER; note = 2'-fluoroguanosine-3'-phosphate
  modified_base 17: mod_base = OTHER; note = 2'-O-methylguanosine-3'-phosphate
  modified_base 18: mod_base = OTHER; note = 2'-O-methyladenosine-3'-phosphate
  modified_base 19: mod_base = OTHER; note = 2'-O-methylguanosine-3'-phosphate
  modified_base 20: mod_base = OTHER; note = 2'-O-methyladenosine-3'-phosphate
  modified_base 21: mod_base = OTHER; note = 2'-O-methyladenosine-3'- phosphorothioate
  modified_base 22: mod_base = OTHER; note = 2'-O-methyladenosine-3'- phosphorothioate
  modified_base 23: mod_base = OTHER; note = 2'-O-methyluridine-3'-phosphate
aatagacggatgctcggagaaat

SEQ ID NO: 5079 - RNA, 23 nt, synthetic construct
  source 1..23: mol_type = other RNA
  modified_base 1: mod_base = OTHER; note = 2'-O-methyladenosine-3'- phosphorothioate
  modified_base 2: mod_base = OTHER; note = 2'-fluorocytidine-3'-phosphorothioate
  modified_base 3: mod_base = OTHER; note = 2'-O-methyluridine-3'-phosphate
  modified_base 4: mod_base = OTHER; note = 2'-O-methylguanosine-3'-phosphate
  modified_base 5: mod_base = OTHER; note = 2'-O-methylcytidine-3'-phosphate
  modified_base 6: mod_base = OTHER; note = 2'-fluorocytidine-3'-phosphate
  modified_base 7: mod_base = OTHER; note = 2'-O-methylcytidine-3'-phosphate
  modified_base 8: mod_base = OTHER; note = 2'-fluoroadenosine-3'-phosphate
  modified_base 9: mod_base = OTHER; note = 2'-fluorouridine-3'-phosphate
  modified_base 10: mod_base = OTHER; note = 2'-O-methyladenosine-3'-phosphate
  modified_base 11: mod_base = OTHER; note = 2'-O-methylguanosine-3'-phosphate
  modified_base 12: mod_base = OTHER; note = 2'-O-methyladenosine-3'-phosphate
  modified_base 13: mod_base = OTHER; note = 2'-O-methylcytidine-3'-phosphate
  modified_base 14: mod_base = OTHER; note = 2'-fluoroguanosine-3'-phosphate
  modified_base 15: mod_base = OTHER; note = 2'-O-methylguanosine-3'-phosphate
  modified_base 16: mod_base = OTHER; note = 2'-fluoroadenosine-3'-phosphate
  modified_base 17: mod_base = OTHER; note = 2'-O-methyluridine-3'-phosphate
  modified_base 18: mod_base = OTHER; note = 2'-O-methylguanosine-3'-phosphate
  modified_base 19: mod_base = OTHER; note = 2'-O-methylcytidine-3'-phosphate
  modified_base 20: mod_base = OTHER; note = 2'-O-methyluridine-3'-phosphate
  modified_base 21: mod_base = OTHER; note = 2'-O-methylcytidine-3'- phosphorothioate
  modified_base 22: mod_base = OTHER; note = 2'-O-methylguanosine-3'- phosphorothioate
  modified_base 23: mod_base = OTHER; note = 2'-O-methylguanosine-3'-phosphate
actgcccatagacggatgctcgg

SEQ ID NO: 5080 - RNA, 23 nt, synthetic construct
  source 1..23: mol_type = other RNA
  modified_base 1: mod_base = OTHER; note = 2'-O-methyladenosine-3'- phosphorothioate
  modified_base 2: mod_base = OTHER; note = 2'-fluoroadenosine-3'-phosphorothioate
  modified_base 3: mod_base = OTHER; note = 2'-O-methylcytidine-3'-phosphate
  modified_base 4: mod_base = OTHER; note = 2'-O-methyladenosine-3'-phosphate
  modified_base 5: mod_base = OTHER; note = 2'-O-methyladenosine-3'-phosphate
  modified_base 6: mod_base = OTHER; note = 2'-fluoroadenosine-3'-phosphate
  modified_base 7: mod_base = OTHER; note = 2'-O-methylcytidine-3'-phosphate
  modified_base 8: mod_base = OTHER; note = 2'-fluorouridine-3'-phosphate
  modified_base 9: mod_base = OTHER; note = 2'-fluoroguanosine-3'-phosphate
  modified_base 10: mod_base = OTHER; note = 2'-O-methylcytidine-3'-phosphate
  modified_base 11: mod_base = OTHER; note = 2'-O-methylcytidine-3'-phosphate
  modified_base 12: mod_base = OTHER; note = 2'-O-methylcytidine-3'-phosphate
  modified_base 13: mod_base = OTHER; note = 2'-O-methyladenosine-3'-phosphate
  modified_base 14: mod_base = OTHER; note = 2'-fluorouridine-3'-phosphate
  modified_base 15: mod_base = OTHER; note = 2'-O-methyladenosine-3'-phosphate
  modified_base 16: mod_base = OTHER; note = 2'-fluoroguanosine-3'-phosphate
  modified_base 17: mod_base = OTHER; note = 2'-O-methyladenosine-3'-phosphate
  modified_base 18: mod_base = OTHER; note = 2'-O-methylcytidine-3'-phosphate
  modified_base 19: mod_base = OTHER; note = 2'-O-methylguanosine-3'-phosphate
  modified_base 20: mod_base = OTHER; note = 2'-O-methylguanosine-3'-phosphate
  modified_base 21: mod_base = OTHER; note = 2'-O-methyladenosine-3'- phosphorothioate
  modified_base 22: mod_base = OTHER; note = 2'-O-methyluridine-3'-phosphorothioate
  modified_base 23: mod_base = OTHER; note = 2'-O-methylguanosine-3'-phosphate
aacaaactgcccatagacggatg

SEQ ID NO: 5081 - RNA, 23 nt, synthetic construct
  source 1..23: mol_type = other RNA
  modified_base 1: mod_base = OTHER; note = 2'-O-methyladenosine-3'- phosphorothioate
  modified_base 2: mod_base = OTHER; note = 2'-fluorocytidine-3'-phosphorothioate
  modified_base 3: mod_base = OTHER; note = 2'-O-methylcytidine-3'-phosphate
  modified_base 4: mod_base = OTHER; note = 2'-O-methyladenosine-3'-phosphate
  modified_base 5: mod_base = OTHER; note = 2'-O-methylguanosine-3'-phosphate
  modified_base 6: mod_base = OTHER; note = 2'-fluorocytidine-3'-phosphate
  modified_base 7: mod_base = OTHER; note = 2'-O-methylcytidine-3'-phosphate
  modified_base 8: mod_base = OTHER; note = 2'-fluoroadenosine-3'-phosphate
  modified_base 9: mod_base = OTHER; note = 2'-fluorocytidine-3'-phosphate
  modified_base 10: mod_base = OTHER; note = 2'-O-methyladenosine-3'-phosphate
  modified_base 11: mod_base = OTHER; note = 2'-O-methyladenosine-3'-phosphate
  modified_base 12: mod_base = OTHER; note = 2'-O-methyladenosine-3'-phosphate
  modified_base 13: mod_base = OTHER; note = 2'-O-methylcytidine-3'-phosphate
  modified_base 14: mod_base = OTHER; note = 2'-fluorouridine-3'-phosphate
  modified_base 15: mod_base = OTHER; note = 2'-O-methylguanosine-3'-phosphate
  modified_base 16: mod_base = OTHER; note = 2'-fluorocytidine-3'-phosphate
  modified_base 17: mod_base = OTHER; note = 2'-O-methylcytidine-3'-phosphate
  modified_base 18: mod_base = OTHER; note = 2'-O-methylcytidine-3'-phosphate
  modified_base 19: mod_base = OTHER; note = 2'-O-methyladenosine-3'-phosphate
  modified_base 20: mod_base = OTHER; note = 2'-O-methyluridine-3'-phosphate
  modified_base 21: mod_base = OTHER; note = 2'-O-methyladenosine-3'- phosphorothioate
  modified_base 22: mod_base = OTHER; note = 2'-O-methylguanosine-3'- phosphorothioate
  modified_base 23: mod_base = OTHER; note = 2'-O-methyladenosine-3'-phosphate
accagccacaaactgcccataga

SEQ ID NO: 5082 - RNA, 23 nt, synthetic construct
  source 1..23: mol_type = other RNA
  modified_base 1: mod_base = OTHER; note = 2'-O-methyladenosine-3'- phosphorothioate
  modified_base 2: mod_base = OTHER; note = 2'-fluoroguanosine-3'-phosphorothioate
  modified_base 3: mod_base = OTHER; note = 2'-O-methyluridine-3'-phosphate
  modified_base 4: mod_base = OTHER; note = 2'-O-methylcytidine-3'-phosphate
  modified_base 5: mod_base = OTHER; note = 2'-O-methyluridine-3'-phosphate
  modified_base 6: mod_base = OTHER; note = 2'-fluorocytidine-3'-phosphate
  modified_base 7: mod_base = OTHER; note = 2'-O-methyladenosine-3'-phosphate
  modified_base 8: mod_base = OTHER; note = 2'-fluorocytidine-3'-phosphate
  modified_base 9: mod_base = OTHER; note = 2'-fluorocytidine-3'-phosphate
  modified_base 10: mod_base = OTHER; note = 2'-O-methyladenosine-3'-phosphate
  modified_base 11: mod_base = OTHER; note = 2'-O-methylguanosine-3'-phosphate
  modified_base 12: mod_base = OTHER; note = 2'-O-methylcytidine-3'-phosphate
  modified_base 13: mod_base = OTHER; note = 2'-O-methylcytidine-3'-phosphate
  modified_base 14: mod_base = OTHER; note = 2'-fluoroadenosine-3'-phosphate
  modified_base 15: mod_base = OTHER; note = 2'-O-methylcytidine-3'-phosphate
  modified_base 16: mod_base = OTHER; note = 2'-fluoroadenosine-3'-phosphate
  modified_base 17: mod_base = OTHER; note = 2'-O-methyladenosine-3'-phosphate
  modified_base 18: mod_base = OTHER; note = 2'-O-methyladenosine-3'-phosphate
  modified_base 19: mod_base = OTHER; note = 2'-O-methylcytidine-3'-phosphate
  modified_base 20: mod_base = OTHER; note = 2'-O-methyluridine-3'-phosphate
  modified_base 21: mod_base = OTHER; note = 2'-O-methylguanosine-3'- phosphorothioate
  modified_base 22: mod_base = OTHER; note = 2'-O-methylcytidine-3'- phosphorothioate
  modified_base 23: mod_base = OTHER; note = 2'-O-methylcytidine-3'-phosphate
agtctcaccagccacaaactgcc

SEQ ID NO: 5083 - RNA, 23 nt, synthetic construct
  source 1..23: mol_type = other RNA
  modified_base 1: mod_base = OTHER; note = 2'-O-methyladenosine-3'- phosphorothioate
  modified_base 2: mod_base = OTHER; note = 2'-fluorocytidine-3'-phosphorothioate
  modified_base 3: mod_base = OTHER; note = 2'-O-methyluridine-3'-phosphate
  modified_base 4: mod_base = OTHER; note = 2'-O-methylcytidine-3'-phosphate
  modified_base 5: mod_base = OTHER; note = 2'-O-methyluridine-3'-phosphate
  modified_base 6: mod_base = OTHER; note = 2'-fluoroguanosine-3'-phosphate
  modified_base 7: mod_base = OTHER; note = 2'-O-methylcytidine-3'-phosphate
  modified_base 8: mod_base = OTHER; note = 2'-fluorouridine-3'-phosphate
  modified_base 9: mod_base = OTHER; note = 2'-fluoroguanosine-3'-phosphate
  modified_base 10: mod_base = OTHER; note = 2'-O-methyluridine-3'-phosphate
  modified_base 11: mod_base = OTHER; note = 2'-O-methylcytidine-3'-phosphate
  modified_base 12: mod_base = OTHER; note = 2'-O-methyluridine-3'-phosphate
  modified_base 13: mod_base = OTHER; note = 2'-O-methylcytidine-3'-phosphate
  modified_base 14: mod_base = OTHER; note = 2'-fluoroadenosine-3'-phosphate
  modified_base 15: mod_base = OTHER; note = 2'-O-methylcytidine-3'-phosphate
  modified_base 16: mod_base = OTHER; note = 2'-fluorocytidine-3'-phosphate
  modified_base 17: mod_base = OTHER; note = 2'-O-methyladenosine-3'-phosphate
  modified_base 18: mod_base = OTHER; note = 2'-O-methylguanosine-3'-phosphate
  modified_base 19: mod_base = OTHER; note = 2'-O-methylcytidine-3'-phosphate
  modified_base 20: mod_base = OTHER; note = 2'-O-methylcytidine-3'-phosphate
  modified_base 21: mod_base = OTHER; note = 2'-O-methyladenosine-3'- phosphorothioate
  modified_base 22: mod_base = OTHER; note = 2'-O-methylcytidine-3'- phosphorothioate
  modified_base 23: mod_base = OTHER; note = 2'-O-methyladenosine-3'-phosphate
actctgctgtctcaccagccaca

SEQ ID NO: 5084 - RNA, 23 nt, synthetic construct
  source 1..23: mol_type = other RNA
  modified_base 1: mod_base = OTHER; note = 2'-O-methyladenosine-3'- phosphorothioate
  modified_base 2: mod_base = OTHER; note = 2'-fluorocytidine-3'-phosphorothioate
  modified_base 3: mod_base = OTHER; note = 2'-O-methyladenosine-3'-phosphate
  modified_base 4: mod_base = OTHER; note = 2'-O-methylcytidine-3'-phosphate
  modified_base 5: mod_base = OTHER; note = 2'-O-methylcytidine-3'-phosphate
  modified_base 6: mod_base = OTHER; note = 2'-fluorouridine-3'-phosphate
  modified_base 7: mod_base = OTHER; note = 2'-O-methylcytidine-3'-phosphate
  modified_base 8: mod_base = OTHER; note = 2'-fluorocytidine-3'-phosphate
  modified_base 9: mod_base = OTHER; note = 2'-fluorouridine-3'-phosphate
  modified_base 10: mod_base = OTHER; note = 2'-O-methylcytidine-3'-phosphate
  modified_base 11: mod_base = OTHER; note = 2'-O-methyluridine-3'-phosphate
  modified_base 12: mod_base = OTHER; note = 2'-O-methylguanosine-3'-phosphate
  modified_base 13: mod_base = OTHER; note = 2'-O-methylcytidine-3'-phosphate
  modified_base 14: mod_base = OTHER; note = 2'-fluorouridine-3'-phosphate
  modified_base 15: mod_base = OTHER; note = 2'-O-methylguanosine-3'-phosphate
  modified_base 16: mod_base = OTHER; note = 2'-fluorouridine-3'-phosphate
  modified_base 17: mod_base = OTHER; note = 2'-O-methylcytidine-3'-phosphate
  modified_base 18: mod_base = OTHER; note = 2'-O-methyluridine-3'-phosphate
  modified_base 19: mod_base = OTHER; note = 2'-O-methylcytidine-3'-phosphate
  modified_base 20: mod_base = OTHER; note = 2'-O-methyladenosine-3'-phosphate
  modified_base 21: mod_base = OTHER; note = 2'-O-methylcytidine-3'- phosphorothioate
  modified_base 22: mod_base = OTHER; note = 2'-O-methylcytidine-3'- phosphorothioate
  modified_base 23: mod_base = OTHER; note = 2'-O-methyladenosine-3'-phosphate
acacctcctctgctgtctcacca

SEQ ID NO: 5085 - RNA, 23 nt, synthetic construct
  source 1..23: mol_type = other RNA
  modified_base 1: mod_base = OTHER; note = 2'-O-methyladenosine-3'- phosphorothioate
  modified_base 2: mod_base = OTHER; note = 2'-fluoroadenosine-3'-phosphorothioate
  modified_base 3: mod_base = OTHER; note = 2'-O-methylguanosine-3'-phosphate
  modified_base 4: mod_base = OTHER; note = 2'-O-methylcytidine-3'-phosphate
  modified_base 5: mod_base = OTHER; note = 2'-O-methylcytidine-3'-phosphate
  modified_base 6: mod_base = OTHER; note = 2'-fluorocytidine-3'-phosphate
  modified_base 7: mod_base = OTHER; note = 2'-O-methyluridine-3'-phosphate
  modified_base 8: mod_base = OTHER; note = 2'-fluorouridine-3'-phosphate
  modified_base 9: mod_base = OTHER; note = 2'-fluorocytidine-3'-phosphate
  modified_base 10: mod_base = OTHER; note = 2'-O-methyladenosine-3'-phosphate
  modified_base 11: mod_base = OTHER; note = 2'-O-methylcytidine-3'-phosphate
  modified_base 12: mod_base = OTHER; note = 2'-O-methylcytidine-3'-phosphate
  modified_base 13: mod_base = OTHER; note = 2'-O-methyluridine-3'-phosphate
  modified_base 14: mod_base = OTHER; note = 2'-fluorocytidine-3'-phosphate
  modified_base 15: mod_base = OTHER; note = 2'-O-methylcytidine-3'-phosphate
  modified_base 16: mod_base = OTHER; note = 2'-fluorouridine-3'-phosphate
  modified_base 17: mod_base = OTHER; note = 2'-O-methylcytidine-3'-phosphate
  modified_base 18: mod_base = OTHER; note = 2'-O-methyluridine-3'-phosphate
  modified_base 19: mod_base = OTHER; note = 2'-O-methylguanosine-3'-phosphate
  modified_base 20: mod_base = OTHER; note = 2'-O-methylcytidine-3'-phosphate
  modified_base 21: mod_base = OTHER; note = 2'-O-methyluridine-3'-phosphorothioate
  modified_base 22: mod_base = OTHER; note = 2'-O-methylguanosine-3'- phosphorothioate
  modified_base 23: mod_base = OTHER; note = 2'-O-methyluridine-3'-phosphate
aagcccttcacctcctctgctgt

SEQ ID NO: 5086 - RNA, 23 nt, synthetic construct
  source 1..23: mol_type = other RNA
  modified_base 1: mod_base = OTHER; note = 2'-O-methyladenosine-3'- phosphorothioate
  modified_base 2: mod_base = OTHER; note = 2'-fluorouridine -3'-phosphorothioate
  modified_base 3: mod_base = OTHER; note = 2'-O-methylguanosine-3'-phosphate
  modified_base 4: mod_base = OTHER; note = 2'-O-methylcytidine-3'-phosphate
  modified_base 5: mod_base = OTHER; note = 2'-O-methyladenosine-3'-phosphate
  modified_base 6: mod_base = OTHER; note = 2'-fluorocytidine-3'-phosphate
  modified_base 7: mod_base = OTHER; note = 2'-O-methylguanosine-3'-phosphate
  modified_base 8: mod_base = OTHER; note = 2'-fluorocytidine-3'-phosphate
  modified_base 9: mod_base = OTHER; note = 2'-fluoroadenosine-3'-phosphate
  modified_base 10: mod_base = OTHER; note = 2'-O-methylguanosine-3'-phosphate
  modified_base 11: mod_base = OTHER; note = 2'-O-methylcytidine-3'-phosphate
  modified_base 12: mod_base = OTHER; note = 2'-O-methylcytidine-3'-phosphate
  modified_base 13: mod_base = OTHER; note = 2'-O-methylcytidine-3'-phosphate
  modified_base 14: mod_base = OTHER; note = 2'-fluorouridine-3'-phosphate
  modified_base 15: mod_base = OTHER; note = 2'-O-methyluridine-3'-phosphate
  modified_base 16: mod_base = OTHER; note = 2'-fluorocytidine-3'-phosphate
  modified_base 17: mod_base = OTHER; note = 2'-O-methyladenosine-3'-phosphate
  modified_base 18: mod_base = OTHER; note = 2'-O-methylcytidine-3'-phosphate
  modified_base 19: mod_base = OTHER; note = 2'-O-methylcytidine-3'-phosphate
  modified_base 20: mod_base = OTHER; note = 2'-O-methyluridine-3'-phosphate
  modified_base 21: mod_base = OTHER; note = 2'-O-methylcytidine-3'- phosphorothioate
  modified_base 22: mod_base = OTHER; note = 2'-O-methylcytidine-3'- phosphorothioate
  modified_base 23: mod_base = OTHER; note = 2'-O-methyluridine-3'-phosphate
atgcacgcagcccttcacctcct

SEQ ID NO: 5087 - RNA, 23 nt, synthetic construct
  source 1..23: mol_type = other RNA
  modified_base 1: mod_base = OTHER; note = 2'-O-methyladenosine-3'- phosphorothioate
  modified_base 2: mod_base = OTHER; note = 2'-fluoroadenosine-3'-phosphorothioate
  modified_base 3: mod_base = OTHER; note = 2'-O-methylguanosine-3'-phosphate
  modified_base 4: mod_base = OTHER; note = 2'-O-methylcytidine-3'-phosphate
  modified_base 5: mod_base = OTHER; note = 2'-O-methyluridine-3'-phosphate
  modified_base 6: mod_base = OTHER; note = 2'-fluoroguanosine-3'-phosphate
  modified_base 7: mod_base = OTHER; note = 2'-O-methylcytidine-3'-phosphate
  modified_base 8: mod_base = OTHER; note = 2'-fluorouridine-3'-phosphate
  modified_base 9: mod_base = OTHER; note = 2'-fluoroguanosine-3'-phosphate
  modified_base 10: mod_base = OTHER; note = 2'-O-methylcytidine-3'-phosphate
  modified_base 11: mod_base = OTHER; note = 2'-O-methyladenosine-3'-phosphate
  modified_base 12: mod_base = OTHER; note = 2'-O-methylcytidine-3'-phosphate
  modified_base 13: mod_base = OTHER; note = 2'-O-methylguanosine-3'-phosphate
  modified_base 14: mod_base = OTHER; note = 2'-fluorocytidine-3'-phosphate
  modified_base 15: mod_base = OTHER; note = 2'-O-methyladenosine-3'-phosphate
  modified_base 16: mod_base = OTHER; note = 2'-fluoroguanosine-3'-phosphate
  modified_base 17: mod_base = OTHER; note = 2'-O-methylcytidine-3'-phosphate
  modified_base 18: mod_base = OTHER; note = 2'-O-methylcytidine-3'-phosphate
  modified_base 19: mod_base = OTHER; note = 2'-O-methylcytidine-3'-phosphate
  modified_base 20: mod_base = OTHER; note = 2'-O-methyluridine-3'-phosphate
  modified_base 21: mod_base = OTHER; note = 2'-O-methyluridine-3'-phosphorothioate
  modified_base 22: mod_base = OTHER; note = 2'-O-methylcytidine-3'- phosphorothioate
  modified_base 23: mod_base = OTHER; note = 2'-O-methyladenosine-3'-phosphate
aagctgctgcacgcagcccttca

SEQ ID NO: 5088 - RNA, 23 nt, synthetic construct
  source 1..23: mol_type = other RNA
  modified_base 1: mod_base = OTHER; note = 2'-O-methyladenosine-3'- phosphorothioate
  modified_base 2: mod_base = OTHER; note = 2'-fluorocytidine-3'-phosphorothioate
  modified_base 3: mod_base = OTHER; note = 2'-O-methyluridine-3'-phosphate
  modified_base 4: mod_base = OTHER; note = 2'-O-methylcytidine-3'-phosphate
  modified_base 5: mod_base = OTHER; note = 2'-O-methyladenosine-3'-phosphate
  modified_base 6: mod_base = OTHER; note = 2'-fluoroguanosine-3'-phosphate
  modified_base 7: mod_base = OTHER; note = 2'-O-methyluridine-3'-phosphate
  modified_base 8: mod_base = OTHER; note = 2'-fluoroguanosine-3'-phosphate
  modified_base 9: mod_base = OTHER; note = 2'-fluoroguanosine-3'-phosphate
  modified_base 10: mod_base = OTHER; note = 2'-O-methylguanosine-3'-phosphate
  modified_base 11: mod_base = OTHER; note = 2'-O-methylcytidine-3'-phosphate
  modified_base 12: mod_base = OTHER; note = 2'-O-methyladenosine-3'-phosphate
  modified_base 13: mod_base = OTHER; note = 2'-O-methylcytidine-3'-phosphate
  modified_base 14: mod_base = OTHER; note = 2'-fluorouridine-3'-phosphate
  modified_base 15: mod_base = OTHER; note = 2'-O-methylguanosine-3'-phosphate
  modified_base 16: mod_base = OTHER; note = 2'-fluorocytidine-3'-phosphate
  modified_base 17: mod_base = OTHER; note = 2'-O-methylcytidine-3'-phosphate
  modified_base 18: mod_base = OTHER; note = 2'-O-methyladenosine-3'-phosphate
  modified_base 19: mod_base = OTHER; note = 2'-O-methylguanosine-3'-phosphate
  modified_base 20: mod_base = OTHER; note = 2'-O-methylcytidine-3'-phosphate
  modified_base 21: mod_base = OTHER; note = 2'-O-methyladenosine-3'- phosphorothioate
  modified_base 22: mod_base = OTHER; note = 2'-O-methylguanosine-3'- phosphorothioate
  modified_base 23: mod_base = OTHER; note = 2'-O-methyluridine-3'-phosphate
actcagtgggcactgccagcagt

SEQ ID NO: 5089 - RNA, 23 nt, synthetic construct
  source 1..23: mol_type = other RNA
  modified_base 1: mod_base = OTHER; note = 2'-O-methyladenosine-3'- phosphorothioate
  modified_base 2: mod_base = OTHER; note = 2'-fluorouridine -3'-phosphorothioate
  modified_base 3: mod_base = OTHER; note = 2'-O-methylcytidine-3'-phosphate
  modified_base 4: mod_base = OTHER; note = 2'-O-methylcytidine-3'-phosphate
  modified_base 5: mod_base = OTHER; note = 2'-O-methyluridine-3'-phosphate
  modified_base 6: mod_base = OTHER; note = 2'-fluorocytidine-3'-phosphate
  modified_base 7: mod_base = OTHER; note = 2'-O-methylcytidine-3'-phosphate
  modified_base 8: mod_base = OTHER; note = 2'-fluorouridine-3'-phosphate
  modified_base 9: mod_base = OTHER; note = 2'-fluorocytidine-3'-phosphate
  modified_base 10: mod_base = OTHER; note = 2'-O-methyladenosine-3'-phosphate
  modified_base 11: mod_base = OTHER; note = 2'-O-methylguanosine-3'-phosphate
  modified_base 12: mod_base = OTHER; note = 2'-O-methyluridine-3'-phosphate
  modified_base 13: mod_base = OTHER; note = 2'-O-methylguanosine-3'-phosphate
  modified_base 14: mod_base = OTHER; note = 2'-fluoroguanosine-3'-phosphate
  modified_base 15: mod_base = OTHER; note = 2'-O-methylguanosine-3'-phosphate
  modified_base 16: mod_base = OTHER; note = 2'-fluorocytidine-3'-phosphate
  modified_base 17: mod_base = OTHER; note = 2'-O-methyladenosine-3'-phosphate
  modified_base 18: mod_base = OTHER; note = 2'-O-methylcytidine-3'-phosphate
  modified_base 19: mod_base = OTHER; note = 2'-O-methyluridine-3'-phosphate
  modified_base 20: mod_base = OTHER; note = 2'-O-methylguanosine-3'-phosphate
  modified_base 21: mod_base = OTHER; note = 2'-O-methylcytidine-3'- phosphorothioate
  modified_base 22: mod_base = OTHER; note = 2'-O-methylcytidine-3'- phosphorothioate
  modified_base 23: mod_base = OTHER; note = 2'-O-methyladenosine-3'-phosphate
atcctcctcagtgggcactgcca

SEQ ID NO: 5090 - RNA, 23 nt, synthetic construct
  source 1..23: mol_type = other RNA
  modified_base 1: mod_base = OTHER; note = 2'-O-methyladenosine-3'- phosphorothioate
  modified_base 2: mod_base = OTHER; note = 2'-fluoroadenosine-3'-phosphorothioate
  modified_base 3: mod_base = OTHER; note = 2'-O-methylguanosine-3'-phosphate
  modified_base 4: mod_base = OTHER; note = 2'-O-methyladenosine-3'-phosphate
  modified_base 5: mod_base = OTHER; note = 2'-O-methylguanosine-3'-phosphate
  modified_base 6: mod_base = OTHER; note = 2'-fluorouridine-3'-phosphate
  modified_base 7: mod_base = OTHER; note = 2'-O-methylcytidine-3'-phosphate
  modified_base 8: mod_base = OTHER; note = 2'-fluorocytidine-3'-phosphate
  modified_base 9: mod_base = OTHER; note = 2'-fluoroguanosine-3'-phosphate
  modified_base 10: mod_base = OTHER; note = 2'-O-methylguanosine-3'-phosphate
  modified_base 11: mod_base = OTHER; note = 2'-O-methylcytidine-3'-phosphate
  modified_base 12: mod_base = OTHER; note = 2'-O-methyluridine-3'-phosphate
  modified_base 13: mod_base = OTHER; note = 2'-O-methylcytidine-3'-phosphate
  modified_base 14: mod_base = OTHER; note = 2'-fluorocytidine-3'-phosphate
  modified_base 15: mod_base = OTHER; note = 2'-O-methyluridine-3'-phosphate
  modified_base 16: mod_base = OTHER; note = 2'-fluorocytidine-3'-phosphate
  modified_base 17: mod_base = OTHER; note = 2'-O-methylcytidine-3'-phosphate
  modified_base 18: mod_base = OTHER; note = 2'-O-methyluridine-3'-phosphate
  modified_base 19: mod_base = OTHER; note = 2'-O-methylcytidine-3'-phosphate
  modified_base 20: mod_base = OTHER; note = 2'-O-methyladenosine-3'-phosphate
  modified_base 21: mod_base = OTHER; note = 2'-O-methylguanosine-3'- phosphorothioate
  modified_base 22: mod_base = OTHER; note = 2'-O-methyluridine-3'-phosphorothioate
  modified_base 23: mod_base = OTHER; note = 2'-O-methylguanosine-3'-phosphate
aagagtccggctcctcctcagtg

SEQ ID NO: 5091 - RNA, 23 nt, synthetic construct
  source 1..23: mol_type = other RNA
  modified_base 1: mod_base = OTHER; note = 2'-O-methyladenosine-3'- phosphorothioate
  modified_base 2: mod_base = OTHER; note = 2'-fluorouridine -3'-phosphorothioate
  modified_base 3: mod_base = OTHER; note = 2'-O-methyluridine-3'-phosphate
  modified_base 4: mod_base = OTHER; note = 2'-O-methylguanosine-3'-phosphate
  modified_base 5: mod_base = OTHER; note = 2'-O-methylguanosine-3'-phosphate
  modified_base 6: mod_base = OTHER; note = 2'-fluorocytidine-3'-phosphate
  modified_base 7: mod_base = OTHER; note = 2'-O-methyladenosine-3'-phosphate
  modified_base 8: mod_base = OTHER; note = 2'-fluoroguanosine-3'-phosphate
  modified_base 9: mod_base = OTHER; note = 2'-fluorocytidine-3'-phosphate
  modified_base 10: mod_base = OTHER; note = 2'-O-methyladenosine-3'-phosphate
  modified_base 11: mod_base = OTHER; note = 2'-O-methylguanosine-3'-phosphate
  modified_base 12: mod_base = OTHER; note = 2'-O-methyladenosine-3'-phosphate
  modified_base 13: mod_base = OTHER; note = 2'-O-methylguanosine-3'-phosphate
  modified_base 14: mod_base = OTHER; note = 2'-fluorouridine-3'-phosphate
  modified_base 15: mod_base = OTHER; note = 2'-O-methylcytidine-3'-phosphate
  modified_base 16: mod_base = OTHER; note = 2'-fluorocytidine-3'-phosphate
  modified_base 17: mod_base = OTHER; note = 2'-O-methylguanosine-3'-phosphate
  modified_base 18: mod_base = OTHER; note = 2'-O-methylguanosine-3'-phosphate
  modified_base 19: mod_base = OTHER; note = 2'-O-methylcytidine-3'-phosphate
  modified_base 20: mod_base = OTHER; note = 2'-O-methyluridine-3'-phosphate
  modified_base 21: mod_base = OTHER; note = 2'-O-methylcytidine-3'- phosphorothioate
  modified_base 22: mod_base = OTHER; note = 2'-O-methylcytidine-3'- phosphorothioate
  modified_base 23: mod_base = OTHER; note = 2'-O-methyluridine-3'-phosphate
attggcagcagagtccggctcct

SEQ ID NO: 5092 - RNA, 23 nt, synthetic construct
  source 1..23: mol_type = other RNA
  modified_base 1: mod_base = OTHER; note = 2'-O-methyladenosine-3'- phosphorothioate
  modified_base 2: mod_base = OTHER; note = 2'-fluoroadenosine-3'-phosphorothioate
  modified_base 3: mod_base = OTHER; note = 2'-O-methylcytidine-3'-phosphate
  modified_base 4: mod_base = OTHER; note = 2'-O-methylcytidine-3'-phosphate
  modified_base 5: mod_base = OTHER; note = 2'-O-methyladenosine-3'-phosphate
  modified_base 6: mod_base = OTHER; note = 2'-fluorocytidine-3'-phosphate
  modified_base 7: mod_base = OTHER; note = 2'-O-methyluridine-3'-phosphate
  modified_base 8: mod_base = OTHER; note = 2'-fluorocytidine-3'-phosphate
  modified_base 9: mod_base = OTHER; note = 2'-fluorouridine-3'-phosphate
  modified_base 10: mod_base = OTHER; note = 2'-O-methyluridine-3'-phosphate
  modified_base 11: mod_base = OTHER; note = 2'-O-methylguanosine-3'-phosphate
  modified_base 12: mod_base = OTHER; note = 2'-O-methylguanosine-3'-phosphate
  modified_base 13: mod_base = OTHER; note = 2'-O-methylcytidine-3'-phosphate
  modified_base 14: mod_base = OTHER; note = 2'-fluoroadenosine-3'-phosphate
  modified_base 15: mod_base = OTHER; note = 2'-O-methylguanosine-3'-phosphate
  modified_base 16: mod_base = OTHER; note = 2'-fluorocytidine-3'-phosphate
  modified_base 17: mod_base = OTHER; note = 2'-O-methyladenosine-3'-phosphate
  modified_base 18: mod_base = OTHER; note = 2'-O-methylguanosine-3'-phosphate
  modified_base 19: mod_base = OTHER; note = 2'-O-methyladenosine-3'-phosphate
  modified_base 20: mod_base = OTHER; note = 2'-O-methylguanosine-3'-phosphate
  modified_base 21: mod_base = OTHER; note = 2'-O-methyluridine-3'-phosphorothioate
  modified_base 22: mod_base = OTHER; note = 2'-O-methylcytidine-3'- phosphorothioate
  modified_base 23: mod_base = OTHER; note = 2'-O-methylcytidine-3'-phosphate
aaccactcttggcagcagagtcc

SEQ ID NO: 5093 - RNA, 23 nt, synthetic construct
  source 1..23: mol_type = other RNA
  modified_base 1: mod_base = OTHER; note = 2'-O-methyladenosine-3'- phosphorothioate
  modified_base 2: mod_base = OTHER; note = 2'-fluoroguanosine-3'-phosphorothioate
  modified_base 3: mod_base = OTHER; note = 2'-O-methylcytidine-3'-phosphate
  modified_base 4: mod_base = OTHER; note = 2'-O-methylcytidine-3'-phosphate
  modified_base 5: mod_base = OTHER; note = 2'-O-methyluridine-3'-phosphate
  modified_base 6: mod_base = OTHER; note = 2'-fluorocytidine-3'-phosphate
  modified_base 7: mod_base = OTHER; note = 2'-O-methyladenosine-3'-phosphate
  modified_base 8: mod_base = OTHER; note = 2'-fluorocytidine-3'-phosphate
  modified_base 9: mod_base = OTHER; note = 2'-fluorocytidine-3'-phosphate
  modified_base 10: mod_base = OTHER; note = 2'-O-methyladenosine-3'-phosphate
  modified_base 11: mod_base = OTHER; note = 2'-O-methylcytidine-3'-phosphate
  modified_base 12: mod_base = OTHER; note = 2'-O-methyluridine-3'-phosphate
  modified_base 13: mod_base = OTHER; note = 2'-O-methylcytidine-3'-phosphate
  modified_base 14: mod_base = OTHER; note = 2'-fluorouridine-3'-phosphate
  modified_base 15: mod_base = OTHER; note = 2'-O-methyluridine-3'-phosphate
  modified_base 16: mod_base = OTHER; note = 2'-fluoroguanosine-3'-phosphate
  modified_base 17: mod_base = OTHER; note = 2'-O-methylguanosine-3'-phosphate
  modified_base 18: mod_base = OTHER; note = 2'-O-methylcytidine-3'-phosphate
  modified_base 19: mod_base = OTHER; note = 2'-O-methyladenosine-3'-phosphate
  modified_base 20: mod_base = OTHER; note = 2'-O-methylguanosine-3'-phosphate
  modified_base 21: mod_base = OTHER; note = 2'-O-methylcytidine-3'- phosphorothioate
  modified_base 22: mod_base = OTHER; note = 2'-O-methyladenosine-3'- phosphorothioate
  modified_base 23: mod_base = OTHER; note = 2'-O-methylguanosine-3'-phosphate
agcctcaccactcttggcagcag

SEQ ID NO: 5094 - RNA, 23 nt, synthetic construct
  source 1..23: mol_type = other RNA
  modified_base 1: mod_base = OTHER; note = 2'-O-methyladenosine-3'- phosphorothioate
  modified_base 2: mod_base = OTHER; note = 2'-fluorouridine -3'-phosphorothioate
  modified_base 3: mod_base = OTHER; note = 2'-O-methylcytidine-3'-phosphate
  modified_base 4: mod_base = OTHER; note = 2'-O-methyladenosine-3'-phosphate
  modified_base 5: mod_base = OTHER; note = 2'-O-methyluridine-3'-phosphate
  modified_base 6: mod_base = OTHER; note = 2'-fluoroadenosine-3'-phosphate
  modified_base 7: mod_base = OTHER; note = 2'-O-methylcytidine-3'-phosphate
  modified_base 8: mod_base = OTHER; note = 2'-fluorocytidine-3'-phosphate
  modified_base 9: mod_base = OTHER; note = 2'-fluoroadenosine-3'-phosphate
  modified_base 10: mod_base = OTHER; note = 2'-O-methylcytidine-3'-phosphate
  modified_base 11: mod_base = OTHER; note = 2'-O-methylguanosine-3'-phosphate
  modified_base 12: mod_base = OTHER; note = 2'-O-methylcytidine-3'-phosphate
  modified_base 13: mod_base = OTHER; note = 2'-O-methylcytidine-3'-phosphate
  modified_base 14: mod_base = OTHER; note = 2'-fluorouridine-3'-phosphate
  modified_base 15: mod_base = OTHER; note = 2'-O-methylcytidine-3'-phosphate
  modified_base 16: mod_base = OTHER; note = 2'-fluoroadenosine-3'-phosphate
  modified_base 17: mod_base = OTHER; note = 2'-O-methylcytidine-3'-phosphate
  modified_base 18: mod_base = OTHER; note = 2'-O-methylcytidine-3'-phosphate
  modified_base 19: mod_base = OTHER; note = 2'-O-methyladenosine-3'-phosphate
  modified_base 20: mod_base = OTHER; note = 2'-O-methylcytidine-3'-phosphate
  modified_base 21: mod_base = OTHER; note = 2'-O-methyluridine-3'-phosphorothioate
  modified_base 22: mod_base = OTHER; note = 2'-O-methylcytidine-3'- phosphorothioate
  modified_base 23: mod_base = OTHER; note = 2'-O-methyluridine-3'-phosphate
atcataccacgcctcaccactct

SEQ ID NO: 5095 - RNA, 23 nt, synthetic construct
  source 1..23: mol_type = other RNA
  modified_base 1: mod_base = OTHER; note = 2'-O-methyladenosine-3'- phosphorothioate
  modified_base 2: mod_base = OTHER; note = 2'-fluorocytidine-3'-phosphorothioate
  modified_base 3: mod_base = OTHER; note = 2'-O-methylguanosine-3'-phosphate
  modified_base 4: mod_base = OTHER; note = 2'-O-methylcytidine-3'-phosphate
  modified_base 5: mod_base = OTHER; note = 2'-O-methyladenosine-3'-phosphate
  modified_base 6: mod_base = OTHER; note = 2'-fluoroguanosine-3'-phosphate
  modified_base 7: mod_base = OTHER; note = 2'-O-methylcytidine-3'-phosphate
  modified_base 8: mod_base = OTHER; note = 2'-fluoroadenosine-3'-phosphate
  modified_base 9: mod_base = OTHER; note = 2'-fluorouridine-3'-phosphate
  modified_base 10: mod_base = OTHER; note = 2'-O-methyladenosine-3'-phosphate
  modified_base 11: mod_base = OTHER; note = 2'-O-methylguanosine-3'-phosphate
  modified_base 12: mod_base = OTHER; note = 2'-O-methylcytidine-3'-phosphate
  modified_base 13: mod_base = OTHER; note = 2'-O-methyladenosine-3'-phosphate
  modified_base 14: mod_base = OTHER; note = 2'-fluorocytidine-3'-phosphate
  modified_base 15: mod_base = OTHER; note = 2'-O-methylcytidine-3'-phosphate
  modified_base 16: mod_base = OTHER; note = 2'-fluoroguanosine-3'-phosphate
  modified_base 17: mod_base = OTHER; note = 2'-O-methyladenosine-3'-phosphate
  modified_base 18: mod_base = OTHER; note = 2'-O-methylguanosine-3'-phosphate
  modified_base 19: mod_base = OTHER; note = 2'-O-methylguanosine-3'-phosphate
  modified_base 20: mod_base = OTHER; note = 2'-O-methyluridine-3'-phosphate
  modified_base 21: mod_base = OTHER; note = 2'-O-methyluridine-3'-phosphorothioate
  modified_base 22: mod_base = OTHER; note = 2'-O-methylcytidine-3'- phosphorothioate
  modified_base 23: mod_base = OTHER; note = 2'-O-methylcytidine-3'-phosphate
acgcagcatagcaccgaggttcc

SEQ ID NO: 5096 - RNA, 23 nt, synthetic construct
  source 1..23: mol_type = other RNA
  modified_base 1: mod_base = OTHER; note = 2'-O-methyladenosine-3'- phosphorothioate
  modified_base 2: mod_base = OTHER; note = 2'-fluorocytidine-3'-phosphorothioate
  modified_base 3: mod_base = OTHER; note = 2'-O-methyladenosine-3'-phosphate
  modified_base 4: mod_base = OTHER; note = 2'-O-methylcytidine-3'-phosphate
  modified_base 5: mod_base = OTHER; note = 2'-O-methyladenosine-3'-phosphate
  modified_base 6: mod_base = OTHER; note = 2'-fluorocytidine-3'-phosphate
  modified_base 7: mod_base = OTHER; note = 2'-O-methylcytidine-3'-phosphate
  modified_base 8: mod_base = OTHER; note = 2'-fluoroguanosine-3'-phosphate
  modified_base 9: mod_base = OTHER; note = 2'-fluorocytidine-3'-phosphate
  modified_base 10: mod_base = OTHER; note = 2'-O-methyladenosine-3'-phosphate
  modified_base 11: mod_base = OTHER; note = 2'-O-methylguanosine-3'-phosphate
  modified_base 12: mod_base = OTHER; note = 2'-O-methylcytidine-3'-phosphate
  modified_base 13: mod_base = OTHER; note = 2'-O-methyladenosine-3'-phosphate
  modified_base 14: mod_base = OTHER; note = 2'-fluorouridine-3'-phosphate
  modified_base 15: mod_base = OTHER; note = 2'-O-methyladenosine-3'-phosphate
  modified_base 16: mod_base = OTHER; note = 2'-fluoroguanosine-3'-phosphate
  modified_base 17: mod_base = OTHER; note = 2'-O-methylcytidine-3'-phosphate
  modified_base 18: mod_base = OTHER; note = 2'-O-methyladenosine-3'-phosphate
  modified_base 19: mod_base = OTHER; note = 2'-O-methylcytidine-3'-phosphate
  modified_base 20: mod_base = OTHER; note = 2'-O-methylcytidine-3'-phosphate
  modified_base 21: mod_base = OTHER; note = 2'-O-methylguanosine-3'- phosphorothioate
  modified_base 22: mod_base = OTHER; note = 2'-O-methyladenosine-3'- phosphorothioate
  modified_base 23: mod_base = OTHER; note = 2'-O-methylguanosine-3'-phosphate
acacaccgcagcatagcaccgag

SEQ ID NO: 5097 - RNA, 23 nt, synthetic construct
  source 1..23: mol_type = other RNA
  modified_base 1: mod_base = OTHER; note = 2'-O-methyladenosine-3'- phosphorothioate
  modified_base 2: mod_base = OTHER; note = 2'-fluoroguanosine-3'-phosphorothioate
  modified_base 3: mod_base = OTHER; note = 2'-O-methyluridine-3'-phosphate
  modified_base 4: mod_base = OTHER; note = 2'-O-methylcytidine-3'-phosphate
  modified_base 5: mod_base = OTHER; note = 2'-O-methylcytidine-3'-phosphate
  modified_base 6: mod_base = OTHER; note = 2'-fluoroadenosine-3'-phosphate
  modified_base 7: mod_base = OTHER; note = 2'-O-methylcytidine-3'-phosphate
  modified_base 8: mod_base = OTHER; note = 2'-fluoroadenosine-3'-phosphate
  modified_base 9: mod_base = OTHER; note = 2'-fluorocytidine-3'-phosphate
  modified_base 10: mod_base = OTHER; note = 2'-O-methyladenosine-3'-phosphate
  modified_base 11: mod_base = OTHER; note = 2'-O-methylcytidine-3'-phosphate
  modified_base 12: mod_base = OTHER; note = 2'-O-methylcytidine-3'-phosphate
  modified_base 13: mod_base = OTHER; note = 2'-O-methylguanosine-3'-phosphate
  modified_base 14: mod_base = OTHER; note = 2'-fluorocytidine-3'-phosphate
  modified_base 15: mod_base = OTHER; note = 2'-O-methyladenosine-3'-phosphate
  modified_base 16: mod_base = OTHER; note = 2'-fluoroguanosine-3'-phosphate
  modified_base 17: mod_base = OTHER; note = 2'-O-methylcytidine-3'-phosphate
  modified_base 18: mod_base = OTHER; note = 2'-O-methyladenosine-3'-phosphate
  modified_base 19: mod_base = OTHER; note = 2'-O-methyluridine-3'-phosphate
  modified_base 20: mod_base = OTHER; note = 2'-O-methyladenosine-3'-phosphate
  modified_base 21: mod_base = OTHER; note = 2'-O-methylguanosine-3'- phosphorothioate
  modified_base 22: mod_base = OTHER; note = 2'-O-methylcytidine-3'- phosphorothioate
  modified_base 23: mod_base = OTHER; note = 2'-O-methyladenosine-3'-phosphate
agtccacacaccgcagcatagca

SEQ ID NO: 5098 - RNA, 23 nt, synthetic construct
  source 1..23: mol_type = other RNA
  modified_base 1: mod_base = OTHER; note = 2'-O-methyladenosine-3'- phosphorothioate
  modified_base 2: mod_base = OTHER; note = 2'-fluorocytidine-3'-phosphorothioate
  modified_base 3: mod_base = OTHER; note = 2'-O-methylguanosine-3'-phosphate
  modified_base 4: mod_base = OTHER; note = 2'-O-methyluridine-3'-phosphate
  modified_base 5: mod_base = OTHER; note = 2'-O-methylguanosine-3'-phosphate
  modified_base 6: mod_base = OTHER; note = 2'-fluoroadenosine-3'-phosphate
  modified_base 7: mod_base = OTHER; note = 2'-O-methylcytidine-3'-phosphate
  modified_base 8: mod_base = OTHER; note = 2'-fluoroadenosine-3'-phosphate
  modified_base 9: mod_base = OTHER; note = 2'-fluoroguanosine-3'-phosphate
  modified_base 10: mod_base = OTHER; note = 2'-O-methylguanosine-3'-phosphate
  modified_base 11: mod_base = OTHER; note = 2'-O-methyluridine-3'-phosphate
  modified_base 12: mod_base = OTHER; note = 2'-O-methylcytidine-3'-phosphate
  modified_base 13: mod_base = OTHER; note = 2'-O-methylcytidine-3'-phosphate
  modified_base 14: mod_base = OTHER; note = 2'-fluoroadenosine-3'-phosphate
  modified_base 15: mod_base = OTHER; note = 2'-O-methylcytidine-3'-phosphate
  modified_base 16: mod_base = OTHER; note = 2'-fluoroadenosine-3'-phosphate
  modified_base 17: mod_base = OTHER; note = 2'-O-methylcytidine-3'-phosphate
  modified_base 18: mod_base = OTHER; note = 2'-O-methyladenosine-3'-phosphate
  modified_base 19: mod_base = OTHER; note = 2'-O-methylcytidine-3'-phosphate
  modified_base 20: mod_base = OTHER; note = 2'-O-methylcytidine-3'-phosphate
  modified_base 21: mod_base = OTHER; note = 2'-O-methylguanosine-3'- phosphorothioate
  modified_base 22: mod_base = OTHER; note = 2'-O-methylcytidine-3'- phosphorothioate
  modified_base 23: mod_base = OTHER; note = 2'-O-methyladenosine-3'-phosphate
acgtgacaggtccacacaccgca

SEQ ID NO: 5099 - RNA, 23 nt, synthetic construct
  source 1..23: mol_type = other RNA
  modified_base 1: mod_base = OTHER; note = 2'-O-methyladenosine-3'- phosphorothioate
  modified_base 2: mod_base = OTHER; note = 2'-fluorouridine -3'-phosphorothioate
  modified_base 3: mod_base = OTHER; note = 2'-O-methylcytidine-3'-phosphate
  modified_base 4: mod_base = OTHER; note = 2'-O-methyladenosine-3'-phosphate
  modified_base 5: mod_base = OTHER; note = 2'-O-methylguanosine-3'-phosphate
  modified_base 6: mod_base = OTHER; note = 2'-fluorocytidine-3'-phosphate
  modified_base 7: mod_base = OTHER; note = 2'-O-methyluridine-3'-phosphate
  modified_base 8: mod_base = OTHER; note = 2'-fluoroguanosine-3'-phosphate
  modified_base 9: mod_base = OTHER; note = 2'-fluorocytidine-3'-phosphate
  modified_base 10: mod_base = OTHER; note = 2'-O-methyladenosine-3'-phosphate
  modified_base 11: mod_base = OTHER; note = 2'-O-methyluridine-3'-phosphate
  modified_base 12: mod_base = OTHER; note = 2'-O-methylguanosine-3'-phosphate
  modified_base 13: mod_base = OTHER; note = 2'-O-methyladenosine-3'-phosphate
  modified_base 14: mod_base = OTHER; note = 2'-fluoroguanosine-3'-phosphate
  modified_base 15: mod_base = OTHER; note = 2'-O-methylguanosine-3'-phosphate
  modified_base 16: mod_base = OTHER; note = 2'-fluorocytidine-3'-phosphate
  modified_base 17: mod_base = OTHER; note = 2'-O-methyluridine-3'-phosphate
  modified_base 18: mod_base = OTHER; note = 2'-O-methylguanosine-3'-phosphate
  modified_base 19: mod_base = OTHER; note = 2'-O-methylguanosine-3'-phosphate
  modified_base 20: mod_base = OTHER; note = 2'-O-methylcytidine-3'-phosphate
  modified_base 21: mod_base = OTHER; note = 2'-O-methylcytidine-3'- phosphorothioate
  modified_base 22: mod_base = OTHER; note = 2'-O-methyluridine-3'-phosphorothioate
  modified_base 23: mod_base = OTHER; note = 2'-O-methylcytidine-3'-phosphate
atcagctgcatgaggctggcctc

SEQ ID NO: 5100 - RNA, 23 nt, synthetic construct
  source 1..23: mol_type = other RNA
  modified_base 1: mod_base = OTHER; note = 2'-O-methyladenosine-3'- phosphorothioate
  modified_base 2: mod_base = OTHER; note = 2'-fluorocytidine-3'-phosphorothioate
  modified_base 3: mod_base = OTHER; note = 2'-O-methyladenosine-3'-phosphate
  modified_base 4: mod_base = OTHER; note = 2'-O-methylcytidine-3'-phosphate
  modified_base 5: mod_base = OTHER; note = 2'-O-methylcytidine-3'-phosphate
  modified_base 6: mod_base = OTHER; note = 2'-fluorouridine-3'-phosphate
  modified_base 7: mod_base = OTHER; note = 2'-O-methyluridine-3'-phosphate
  modified_base 8: mod_base = OTHER; note = 2'-fluorocytidine-3'-phosphate
  modified_base 9: mod_base = OTHER; note = 2'-fluoroadenosine-3'-phosphate
  modified_base 10: mod_base = OTHER; note = 2'-O-methylguanosine-3'-phosphate
  modified_base 11: mod_base = OTHER; note = 2'-O-methylcytidine-3'-phosphate
  modified_base 12: mod_base = OTHER; note = 2'-O-methyluridine-3'-phosphate
  modified_base 13: mod_base = OTHER; note = 2'-O-methylguanosine-3'-phosphate
  modified_base 14: mod_base = OTHER; note = 2'-fluorocytidine-3'-phosphate
  modified_base 15: mod_base = OTHER; note = 2'-O-methyladenosine-3'-phosphate
  modified_base 16: mod_base = OTHER; note = 2'-fluorouridine-3'-phosphate
  modified_base 17: mod_base = OTHER; note = 2'-O-methylguanosine-3'-phosphate
  modified_base 18: mod_base = OTHER; note = 2'-O-methyladenosine-3'-phosphate
  modified_base 19: mod_base = OTHER; note = 2'-O-methylguanosine-3'-phosphate
  modified_base 20: mod_base = OTHER; note = 2'-O-methylguanosine-3'-phosphate
  modified_base 21: mod_base = OTHER; note = 2'-O-methylcytidine-3'- phosphorothioate
  modified_base 22: mod_base = OTHER; note = 2'-O-methyluridine-3'-phosphorothioate
  modified_base 23: mod_base = OTHER; note = 2'-O-methylguanosine-3'-phosphate
acaccttcagctgcatgaggctg

SEQ ID NO: 5101 - RNA, 23 nt, synthetic construct
  source 1..23: mol_type = other RNA
  modified_base 1: mod_base = OTHER; note = 2'-O-methyladenosine-3'- phosphorothioate
  modified_base 2: mod_base = OTHER; note = 2'-fluoroguanosine-3'-phosphorothioate
  modified_base 3: mod_base = OTHER; note = 2'-O-methylcytidine-3'-phosphate
  modified_base 4: mod_base = OTHER; note = 2'-O-methylcytidine-3'-phosphate
  modified_base 5: mod_base = OTHER; note = 2'-O-methylguanosine-3'-phosphate
  modified_base 6: mod_base = OTHER; note = 2'-fluorouridine-3'-phosphate
  modified_base 7: mod_base = OTHER; note = 2'-O-methylcytidine-3'-phosphate
  modified_base 8: mod_base = OTHER; note = 2'-fluoroadenosine-3'-phosphate
  modified_base 9: mod_base = OTHER; note = 2'-fluorocytidine-3'-phosphate
  modified_base 10: mod_base = OTHER; note = 2'-O-methylcytidine-3'-phosphate
  modified_base 11: mod_base = OTHER; note = 2'-O-methyluridine-3'-phosphate
  modified_base 12: mod_base = OTHER; note = 2'-O-methyluridine-3'-phosphate
  modified_base 13: mod_base = OTHER; note = 2'-O-methylcytidine-3'-phosphate
  modified_base 14: mod_base = OTHER; note = 2'-fluoroadenosine-3'-phosphate
  modified_base 15: mod_base = OTHER; note = 2'-O-methylguanosine-3'-phosphate
  modified_base 16: mod_base = OTHER; note = 2'-fluorocytidine-3'-phosphate
  modified_base 17: mod_base = OTHER; note = 2'-O-methyluridine-3'-phosphate
  modified_base 18: mod_base = OTHER; note = 2'-O-methylguanosine-3'-phosphate
  modified_base 19: mod_base = OTHER; note = 2'-O-methylcytidine-3'-phosphate
  modified_base 20: mod_base = OTHER; note = 2'-O-methyladenosine-3'-phosphate
  modified_base 21: mod_base = OTHER; note = 2'-O-methyluridine-3'-phosphorothioate
  modified_base 22: mod_base = OTHER; note = 2'-O-methylguanosine-3'- phosphorothioate
  modified_base 23: mod_base = OTHER; note = 2'-O-methyladenosine-3'-phosphate
agccgtcaccttcagctgcatga

SEQ ID NO: 5102 - RNA, 23 nt, synthetic construct
  source 1..23: mol_type = other RNA
  modified_base 1: mod_base = OTHER; note = 2'-O-methyladenosine-3'- phosphorothioate
  modified_base 2: mod_base = OTHER; note = 2'-fluorouridine -3'-phosphorothioate
  modified_base 3: mod_base = OTHER; note = 2'-O-methylcytidine-3'-phosphate
  modified_base 4: mod_base = OTHER; note = 2'-O-methyladenosine-3'-phosphate
  modified_base 5: mod_base = OTHER; note = 2'-O-methylguanosine-3'-phosphate
  modified_base 6: mod_base = OTHER; note = 2'-fluorocytidine-3'-phosphate
  modified_base 7: mod_base = OTHER; note = 2'-O-methylguanosine-3'-phosphate
  modified_base 8: mod_base = OTHER; note = 2'-fluorocytidine-3'-phosphate
  modified_base 9: mod_base = OTHER; note = 2'-fluorocytidine-3'-phosphate
  modified_base 10: mod_base = OTHER; note = 2'-O-methylguanosine-3'-phosphate
  modified_base 11: mod_base = OTHER; note = 2'-O-methyluridine-3'-phosphate
  modified_base 12: mod_base = OTHER; note = 2'-O-methylcytidine-3'-phosphate
  modified_base 13: mod_base = OTHER; note = 2'-O-methyladenosine-3'-phosphate
  modified_base 14: mod_base = OTHER; note = 2'-fluorocytidine-3'-phosphate
  modified_base 15: mod_base = OTHER; note = 2'-O-methylcytidine-3'-phosphate
  modified_base 16: mod_base = OTHER; note = 2'-fluorouridine-3'-phosphate
  modified_base 17: mod_base = OTHER; note = 2'-O-methyluridine-3'-phosphate
  modified_base 18: mod_base = OTHER; note = 2'-O-methylcytidine-3'-phosphate
  modified_base 19: mod_base = OTHER; note = 2'-O-methyladenosine-3'-phosphate
  modified_base 20: mod_base = OTHER; note = 2'-O-methylguanosine-3'-phosphate
  modified_base 21: mod_base = OTHER; note = 2'-O-methylcytidine-3'- phosphorothioate
  modified_base 22: mod_base = OTHER; note = 2'-O-methyluridine-3'-phosphorothioate
  modified_base 23: mod_base = OTHER; note = 2'-O-methylguanosine-3'-phosphate
atcagcgccgtcaccttcagctg

SEQ ID NO: 5103 - RNA, 23 nt, synthetic construct
  source 1..23: mol_type = other RNA
  modified_base 1: mod_base = OTHER; note = 2'-O-methyladenosine-3'- phosphorothioate
  modified_base 2: mod_base = OTHER; note = 2'-fluorouridine -3'-phosphorothioate
  modified_base 3: mod_base = OTHER; note = 2'-O-methyladenosine-3'-phosphate
  modified_base 4: mod_base = OTHER; note = 2'-O-methylcytidine-3'-phosphate
  modified_base 5: mod_base = OTHER; note = 2'-O-methyluridine-3'-phosphate
  modified_base 6: mod_base = OTHER; note = 2'-fluoroguanosine-3'-phosphate
  modified_base 7: mod_base = OTHER; note = 2'-O-methylguanosine-3'-phosphate
  modified_base 8: mod_base = OTHER; note = 2'-fluorouridine-3'-phosphate
  modified_base 9: mod_base = OTHER; note = 2'-fluorocytidine-3'-phosphate
  modified_base 10: mod_base = OTHER; note = 2'-O-methyladenosine-3'-phosphate
  modified_base 11: mod_base = OTHER; note = 2'-O-methylguanosine-3'-phosphate
  modified_base 12: mod_base = OTHER; note = 2'-O-methylcytidine-3'-phosphate
  modified_base 13: mod_base = OTHER; note = 2'-O-methylguanosine-3'-phosphate
  modified_base 14: mod_base = OTHER; note = 2'-fluorocytidine-3'-phosphate
  modified_base 15: mod_base = OTHER; note = 2'-O-methylcytidine-3'-phosphate
  modified_base 16: mod_base = OTHER; note = 2'-fluoroguanosine-3'-phosphate
  modified_base 17: mod_base = OTHER; note = 2'-O-methyluridine-3'-phosphate
  modified_base 18: mod_base = OTHER; note = 2'-O-methylcytidine-3'-phosphate
  modified_base 19: mod_base = OTHER; note = 2'-O-methyladenosine-3'-phosphate
  modified_base 20: mod_base = OTHER; note = 2'-O-methylcytidine-3'-phosphate
  modified_base 21: mod_base = OTHER; note = 2'-O-methylcytidine-3'- phosphorothioate
  modified_base 22: mod_base = OTHER; note = 2'-O-methyluridine-3'-phosphorothioate
  modified_base 23: mod_base = OTHER; note = 2'-O-methyluridine-3'-phosphate
atactggtcagcgccgtcacctt

SEQ ID NO: 5104 - RNA, 23 nt, synthetic construct
  source 1..23: mol_type = other RNA
  modified_base 1: mod_base = OTHER; note = 2'-O-methyladenosine-3'- phosphorothioate
  modified_base 2: mod_base = OTHER; note = 2'-fluoroadenosine-3'-phosphorothioate
  modified_base 3: mod_base = OTHER; note = 2'-O-methylguanosine-3'-phosphate
  modified_base 4: mod_base = OTHER; note = 2'-O-methyladenosine-3'-phosphate
  modified_base 5: mod_base = OTHER; note = 2'-O-methylguanosine-3'-phosphate
  modified_base 6: mod_base = OTHER; note = 2'-fluorocytidine-3'-phosphate
  modified_base 7: mod_base = OTHER; note = 2'-O-methylcytidine-3'-phosphate
  modified_base 8: mod_base = OTHER; note = 2'-fluoroguanosine-3'-phosphate
  modified_base 9: mod_base = OTHER; note = 2'-fluoroadenosine-3'-phosphate
  modified_base 10: mod_base = OTHER; note = 2'-O-methylguanosine-3'-phosphate
  modified_base 11: mod_base = OTHER; note = 2'-O-methyluridine-3'-phosphate
  modified_base 12: mod_base = OTHER; note = 2'-O-methyladenosine-3'-phosphate
  modified_base 13: mod_base = OTHER; note = 2'-O-methylcytidine-3'-phosphate
  modified_base 14: mod_base = OTHER; note = 2'-fluorouridine-3'-phosphate
  modified_base 15: mod_base = OTHER; note = 2'-O-methylguanosine-3'-phosphate
  modified_base 16: mod_base = OTHER; note = 2'-fluoroguanosine-3'-phosphate
  modified_base 17: mod_base = OTHER; note = 2'-O-methyluridine-3'-phosphate
  modified_base 18: mod_base = OTHER; note = 2'-O-methylcytidine-3'-phosphate
  modified_base 19: mod_base = OTHER; note = 2'-O-methyladenosine-3'-phosphate
  modified_base 20: mod_base = OTHER; note = 2'-O-methylguanosine-3'-phosphate
  modified_base 21: mod_base = OTHER; note = 2'-O-methylcytidine-3'- phosphorothioate
  modified_base 22: mod_base = OTHER; note = 2'-O-methylguanosine-3'- phosphorothioate
  modified_base 23: mod_base = OTHER; note = 2'-O-methylcytidine-3'-phosphate
aagagccgagtactggtcagcgc

SEQ ID NO: 5105 - RNA, 23 nt, synthetic construct
  source 1..23: mol_type = other RNA
  modified_base 1: mod_base = OTHER; note = 2'-O-methyladenosine-3'- phosphorothioate
  modified_base 2: mod_base = OTHER; note = 2'-fluorouridine -3'-phosphorothioate
  modified_base 3: mod_base = OTHER; note = 2'-O-methylcytidine-3'-phosphate
  modified_base 4: mod_base = OTHER; note = 2'-O-methylcytidine-3'-phosphate
  modified_base 5: mod_base = OTHER; note = 2'-O-methyluridine-3'-phosphate
  modified_base 6: mod_base = OTHER; note = 2'-fluorouridine-3'-phosphate
  modified_base 7: mod_base = OTHER; note = 2'-O-methyladenosine-3'-phosphate
  modified_base 8: mod_base = OTHER; note = 2'-fluorocytidine-3'-phosphate
  modified_base 9: mod_base = OTHER; note = 2'-fluoroadenosine-3'-phosphate
  modified_base 10: mod_base = OTHER; note = 2'-O-methylguanosine-3'-phosphate
  modified_base 11: mod_base = OTHER; note = 2'-O-methyladenosine-3'-phosphate
  modified_base 12: mod_base = OTHER; note = 2'-O-methylguanosine-3'-phosphate
  modified_base 13: mod_base = OTHER; note = 2'-O-methylcytidine-3'-phosphate
  modified_base 14: mod_base = OTHER; note = 2'-fluorocytidine-3'-phosphate
  modified_base 15: mod_base = OTHER; note = 2'-O-methylguanosine-3'-phosphate
  modified_base 16: mod_base = OTHER; note = 2'-fluoroadenosine-3'-phosphate
  modified_base 17: mod_base = OTHER; note = 2'-O-methylguanosine-3'-phosphate
  modified_base 18: mod_base = OTHER; note = 2'-O-methyluridine-3'-phosphate
  modified_base 19: mod_base = OTHER; note = 2'-O-methyladenosine-3'-phosphate
  modified_base 20: mod_base = OTHER; note = 2'-O-methylcytidine-3'-phosphate
  modified_base 21: mod_base = OTHER; note = 2'-O-methyluridine-3'-phosphorothioate
  modified_base 22: mod_base = OTHER; note = 2'-O-methylguanosine-3'- phosphorothioate
  modified_base 23: mod_base = OTHER; note = 2'-O-methylguanosine-3'-phosphate
atccttacagagccgagtactgg

SEQ ID NO: 5106 - RNA, 23 nt, synthetic construct
  source 1..23: mol_type = other RNA
  modified_base 1: mod_base = OTHER; note = 2'-O-methyladenosine-3'- phosphorothioate
  modified_base 2: mod_base = OTHER; note = 2'-fluorocytidine-3'-phosphorothioate
  modified_base 3: mod_base = OTHER; note = 2'-O-methyluridine-3'-phosphate
  modified_base 4: mod_base = OTHER; note = 2'-O-methyladenosine-3'-phosphate
  modified_base 5: mod_base = OTHER; note = 2'-O-methylguanosine-3'-phosphate
  modified_base 6: mod_base = OTHER; note = 2'-fluorocytidine-3'-phosphate
  modified_base 7: mod_base = OTHER; note = 2'-O-methyluridine-3'-phosphate
  modified_base 8: mod_base = OTHER; note = 2'-fluorocytidine-3'-phosphate
  modified_base 9: mod_base = OTHER; note = 2'-fluorocytidine-3'-phosphate
  modified_base 10: mod_base = OTHER; note = 2'-O-methyluridine-3'-phosphate
  modified_base 11: mod_base = OTHER; note = 2'-O-methyluridine-3'-phosphate
  modified_base 12: mod_base = OTHER; note = 2'-O-methyladenosine-3'-phosphate
  modified_base 13: mod_base = OTHER; note = 2'-O-methylcytidine-3'-phosphate
  modified_base 14: mod_base = OTHER; note = 2'-fluoroadenosine-3'-phosphate
  modified_base 15: mod_base = OTHER; note = 2'-O-methylguanosine-3'-phosphate
  modified_base 16: mod_base = OTHER; note = 2'-fluoroadenosine-3'-phosphate
  modified_base 17: mod_base = OTHER; note = 2'-O-methylguanosine-3'-phosphate
  modified_base 18: mod_base = OTHER; note = 2'-O-methylcytidine-3'-phosphate
  modified_base 19: mod_base = OTHER; note = 2'-O-methylcytidine-3'-phosphate
  modified_base 20: mod_base = OTHER; note = 2'-O-methylguanosine-3'-phosphate
  modified_base 21: mod_base = OTHER; note = 2'-O-methyladenosine-3'- phosphorothioate
  modified_base 22: mod_base = OTHER; note = 2'-O-methylguanosine-3'- phosphorothioate
  modified_base 23: mod_base = OTHER; note = 2'-O-methyluridine-3'-phosphate
actagctccttacagagccgagt

SEQ ID NO: 5107 - RNA, 23 nt, synthetic construct
  source 1..23: mol_type = other RNA
  modified_base 1: mod_base = OTHER; note = 2'-O-methyladenosine-3'- phosphorothioate
  modified_base 2: mod_base = OTHER; note = 2'-fluoroadenosine-3'-phosphorothioate
  modified_base 3: mod_base = OTHER; note = 2'-O-methylcytidine-3'-phosphate
  modified_base 4: mod_base = OTHER; note = 2'-O-methylguanosine-3'-phosphate
  modified_base 5: mod_base = OTHER; note = 2'-O-methyladenosine-3'-phosphate
  modified_base 6: mod_base = OTHER; note = 2'-fluoroguanosine-3'-phosphate
  modified_base 7: mod_base = OTHER; note = 2'-O-methylguanosine-3'-phosphate
  modified_base 8: mod_base = OTHER; note = 2'-fluorocytidine-3'-phosphate
  modified_base 9: mod_base = OTHER; note = 2'-fluorouridine-3'-phosphate
  modified_base 10: mod_base = OTHER; note = 2'-O-methyladenosine-3'-phosphate
  modified_base 11: mod_base = OTHER; note = 2'-O-methylguanosine-3'-phosphate
  modified_base 12: mod_base = OTHER; note = 2'-O-methylcytidine-3'-phosphate
  modified_base 13: mod_base = OTHER; note = 2'-O-methyluridine-3'-phosphate
  modified_base 14: mod_base = OTHER; note = 2'-fluorocytidine-3'-phosphate
  modified_base 15: mod_base = OTHER; note = 2'-O-methylcytidine-3'-phosphate
  modified_base 16: mod_base = OTHER; note = 2'-fluorouridine-3'-phosphate
  modified_base 17: mod_base = OTHER; note = 2'-O-methyluridine-3'-phosphate
  modified_base 18: mod_base = OTHER; note = 2'-O-methyladenosine-3'-phosphate
  modified_base 19: mod_base = OTHER; note = 2'-O-methylcytidine-3'-phosphate
  modified_base 20: mod_base = OTHER; note = 2'-O-methyladenosine-3'-phosphate
  modified_base 21: mod_base = OTHER; note = 2'-O-methylguanosine-3'- phosphorothioate
  modified_base 22: mod_base = OTHER; note = 2'-O-methyladenosine-3'- phosphorothioate
  modified_base 23: mod_base = OTHER; note = 2'-O-methylguanosine-3'-phosphate
aacgaggctagctccttacagag

SEQ ID NO: 5108 - RNA, 23 nt, synthetic construct
  source 1..23: mol_type = other RNA
  modified_base 1: mod_base = OTHER; note = 2'-O-methyladenosine-3'- phosphorothioate
  modified_base 2: mod_base = OTHER; note = 2'-fluoroguanosine-3'-phosphorothioate
  modified_base 3: mod_base = OTHER; note = 2'-O-methyladenosine-3'-phosphate
  modified_base 4: mod_base = OTHER; note = 2'-O-methylcytidine-3'-phosphate
  modified_base 5: mod_base = OTHER; note = 2'-O-methylcytidine-3'-phosphate
  modified_base 6: mod_base = OTHER; note = 2'-fluorocytidine-3'-phosphate
  modified_base 7: mod_base = OTHER; note = 2'-O-methyladenosine-3'-phosphate
  modified_base 8: mod_base = OTHER; note = 2'-fluorocytidine-3'-phosphate
  modified_base 9: mod_base = OTHER; note = 2'-fluoroguanosine-3'-phosphate
  modified_base 10: mod_base = OTHER; note = 2'-O-methyladenosine-3'-phosphate
  modified_base 11: mod_base = OTHER; note = 2'-O-methylguanosine-3'-phosphate
  modified_base 12: mod_base = OTHER; note = 2'-O-methylguanosine-3'-phosphate
  modified_base 13: mod_base = OTHER; note = 2'-O-methylcytidine-3'-phosphate
  modified_base 14: mod_base = OTHER; note = 2'-fluorouridine-3'-phosphate
  modified_base 15: mod_base = OTHER; note = 2'-O-methyladenosine-3'-phosphate
  modified_base 16: mod_base = OTHER; note = 2'-fluoroguanosine-3'-phosphate
  modified_base 17: mod_base = OTHER; note = 2'-O-methylcytidine-3'-phosphate
  modified_base 18: mod_base = OTHER; note = 2'-O-methyluridine-3'-phosphate
  modified_base 19: mod_base = OTHER; note = 2'-O-methylcytidine-3'-phosphate
  modified_base 20: mod_base = OTHER; note = 2'-O-methylcytidine-3'-phosphate
  modified_base 21: mod_base = OTHER; note = 2'-O-methyluridine-3'-phosphorothioate
  modified_base 22: mod_base = OTHER; note = 2'-O-methyluridine-3'-phosphorothioate
  modified_base 23: mod_base = OTHER; note = 2'-O-methyladenosine-3'-phosphate
agacccacgaggctagctcctta

SEQ ID NO: 5109 - RNA, 23 nt, synthetic construct
  source 1..23: mol_type = other RNA
  modified_base 1: mod_base = OTHER; note = 2'-O-methyladenosine-3'- phosphorothioate
  modified_base 2: mod_base = OTHER; note = 2'-fluoroguanosine-3'-phosphorothioate
  modified_base 3: mod_base = OTHER; note = 2'-O-methylcytidine-3'-phosphate
  modified_base 4: mod_base = OTHER; note = 2'-O-methylcytidine-3'-phosphate
  modified_base 5: mod_base = OTHER; note = 2'-O-methyluridine-3'-phosphate
  modified_base 6: mod_base = OTHER; note = 2'-fluorouridine-3'-phosphate
  modified_base 7: mod_base = OTHER; note = 2'-O-methylcytidine-3'-phosphate
  modified_base 8: mod_base = OTHER; note = 2'-fluorouridine-3'-phosphate
  modified_base 9: mod_base = OTHER; note = 2'-fluoroguanosine-3'-phosphate
  modified_base 10: mod_base = OTHER; note = 2'-O-methyladenosine-3'-phosphate
  modified_base 11: mod_base = OTHER; note = 2'-O-methylcytidine-3'-phosphate
  modified_base 12: mod_base = OTHER; note = 2'-O-methylcytidine-3'-phosphate
  modified_base 13: mod_base = OTHER; note = 2'-O-methylcytidine-3'-phosphate
  modified_base 14: mod_base = OTHER; note = 2'-fluoroadenosine-3'-phosphate
  modified_base 15: mod_base = OTHER; note = 2'-O-methylcytidine-3'-phosphate
  modified_base 16: mod_base = OTHER; note = 2'-fluoroguanosine-3'-phosphate
  modified_base 17: mod_base = OTHER; note = 2'-O-methyladenosine-3'-phosphate
  modified_base 18: mod_base = OTHER; note = 2'-O-methylguanosine-3'-phosphate
  modified_base 19: mod_base = OTHER; note = 2'-O-methylguanosine-3'-phosphate
  modified_base 20: mod_base = OTHER; note = 2'-O-methylcytidine-3'-phosphate
  modified_base 21: mod_base = OTHER; note = 2'-O-methyluridine-3'-phosphorothioate
  modified_base 22: mod_base = OTHER; note = 2'-O-methyladenosine-3'- phosphorothioate
  modified_base 23: mod_base = OTHER; note = 2'-O-methylguanosine-3'-phosphate
agccttctgacccacgaggctag

SEQ ID NO: 5110 - RNA, 23 nt, synthetic construct
  source 1..23: mol_type = other RNA
  modified_base 1: mod_base = OTHER; note = 2'-O-methyladenosine-3'- phosphorothioate
  modified_base 2: mod_base = OTHER; note = 2'-fluorocytidine-3'-phosphorothioate
  modified_base 3: mod_base = OTHER; note = 2'-O-methyluridine-3'-phosphate
  modified_base 4: mod_base = OTHER; note = 2'-O-methylcytidine-3'-phosphate
  modified_base 5: mod_base = OTHER; note = 2'-O-methylcytidine-3'-phosphate
  modified_base 6: mod_base = OTHER; note = 2'-fluorouridine-3'-phosphate
  modified_base 7: mod_base = OTHER; note = 2'-O-methylguanosine-3'-phosphate
  modified_base 8: mod_base = OTHER; note = 2'-fluoroguanosine-3'-phosphate
  modified_base 9: mod_base = OTHER; note = 2'-fluorocytidine-3'-phosphate
  modified_base 10: mod_base = OTHER; note = 2'-O-methylcytidine-3'-phosphate
  modified_base 11: mod_base = OTHER; note = 2'-O-methyluridine-3'-phosphate
  modified_base 12: mod_base = OTHER; note = 2'-O-methyluridine-3'-phosphate
  modified_base 13: mod_base = OTHER; note = 2'-O-methylcytidine-3'-phosphate
  modified_base 14: mod_base = OTHER; note = 2'-fluorouridine-3'-phosphate
  modified_base 15: mod_base = OTHER; note = 2'-O-methylguanosine-3'-phosphate
  modified_base 16: mod_base = OTHER; note = 2'-fluoroadenosine-3'-phosphate
  modified_base 17: mod_base = OTHER; note = 2'-O-methylcytidine-3'-phosphate
  modified_base 18: mod_base = OTHER; note = 2'-O-methylcytidine-3'-phosphate
  modified_base 19: mod_base = OTHER; note = 2'-O-methylcytidine-3'-phosphate
  modified_base 20: mod_base = OTHER; note = 2'-O-methyladenosine-3'-phosphate
  modified_base 21: mod_base = OTHER; note = 2'-O-methylcytidine-3'- phosphorothioate
  modified_base 22: mod_base = OTHER; note = 2'-O-methylguanosine-3'- phosphorothioate
  modified_base 23: mod_base = OTHER; note = 2'-O-methyladenosine-3'-phosphate
actcctggccttctgacccacga

SEQ ID NO: 5111 - RNA, 23 nt, synthetic construct
  source 1..23: mol_type = other RNA
  modified_base 1: mod_base = OTHER; note = 2'-O-methyladenosine-3'- phosphorothioate
  modified_base 2: mod_base = OTHER; note = 2'-fluorocytidine-3'-phosphorothioate
  modified_base 3: mod_base = OTHER; note = 2'-O-methyluridine-3'-phosphate
  modified_base 4: mod_base = OTHER; note = 2'-O-methylcytidine-3'-phosphate
  modified_base 5: mod_base = OTHER; note = 2'-O-methylcytidine-3'-phosphate
  modified_base 6: mod_base = OTHER; note = 2'-fluoroadenosine-3'-phosphate
  modified_base 7: mod_base = OTHER; note = 2'-O-methyladenosine-3'-phosphate
  modified_base 8: mod_base = OTHER; note = 2'-fluoroguanosine-3'-phosphate
  modified_base 9: mod_base = OTHER; note = 2'-fluoroguanosine-3'-phosphate
  modified_base 10: mod_base = OTHER; note = 2'-O-methyladenosine-3'-phosphate
  modified_base 11: mod_base = OTHER; note = 2'-O-methylguanosine-3'-phosphate
  modified_base 12: mod_base = OTHER; note = 2'-O-methylguanosine-3'-phosphate
  modified_base 13: mod_base = OTHER; note = 2'-O-methylcytidine-3'-phosphate
  modified_base 14: mod_base = OTHER; note = 2'-fluorouridine-3'-phosphate
  modified_base 15: mod_base = OTHER; note = 2'-O-methylcytidine-3'-phosphate
  modified_base 16: mod_base = OTHER; note = 2'-fluorocytidine-3'-phosphate
  modified_base 17: mod_base = OTHER; note = 2'-O-methyluridine-3'-phosphate
  modified_base 18: mod_base = OTHER; note = 2'-O-methylguanosine-3'-phosphate
  modified_base 19: mod_base = OTHER; note = 2'-O-methylguanosine-3'-phosphate
  modified_base 20: mod_base = OTHER; note = 2'-O-methylcytidine-3'-phosphate
  modified_base 21: mod_base = OTHER; note = 2'-O-methylcytidine-3'- phosphorothioate
  modified_base 22: mod_base = OTHER; note = 2'-O-methyluridine-3'-phosphorothioate
  modified_base 23: mod_base = OTHER; note = 2'-O-methyluridine-3'-phosphate
actccaaggaggctcctggcctt

SEQ ID NO: 5112 - RNA, 23 nt, synthetic construct
  source 1..23: mol_type = other RNA
  modified_base 1: mod_base = OTHER; note = 2'-O-methyladenosine-3'- phosphorothioate
  modified_base 2: mod_base = OTHER; note = 2'-fluorocytidine-3'-phosphorothioate
  modified_base 3: mod_base = OTHER; note = 2'-O-methyluridine-3'-phosphate
  modified_base 4: mod_base = OTHER; note = 2'-O-methylcytidine-3'-phosphate
  modified_base 5: mod_base = OTHER; note = 2'-O-methyladenosine-3'-phosphate
  modified_base 6: mod_base = OTHER; note = 2'-fluoroguanosine-3'-phosphate
  modified_base 7: mod_base = OTHER; note = 2'-O-methylcytidine-3'-phosphate
  modified_base 8: mod_base = OTHER; note = 2'-fluorouridine-3'-phosphate
  modified_base 9: mod_base = OTHER; note = 2'-fluorocytidine-3'-phosphate
  modified_base 10: mod_base = OTHER; note = 2'-O-methylcytidine-3'-phosphate
  modified_base 11: mod_base = OTHER; note = 2'-O-methyladenosine-3'-phosphate
  modified_base 12: mod_base = OTHER; note = 2'-O-methyladenosine-3'-phosphate
  modified_base 13: mod_base = OTHER; note = 2'-O-methylguanosine-3'-phosphate
  modified_base 14: mod_base = OTHER; note = 2'-fluoroguanosine-3'-phosphate
  modified_base 15: mod_base = OTHER; note = 2'-O-methyladenosine-3'-phosphate
  modified_base 16: mod_base = OTHER; note = 2'-fluoroguanosine-3'-phosphate
  modified_base 17: mod_base = OTHER; note = 2'-O-methylguanosine-3'-phosphate
  modified_base 18: mod_base = OTHER; note = 2'-O-methylcytidine-3'-phosphate
  modified_base 19: mod_base = OTHER; note = 2'-O-methyluridine-3'-phosphate
  modified_base 20: mod_base = OTHER; note = 2'-O-methylcytidine-3'-phosphate
  modified_base 21: mod_base = OTHER; note = 2'-O-methylcytidine-3'- phosphorothioate
  modified_base 22: mod_base = OTHER; note = 2'-O-methyluridine-3'-phosphorothioate
  modified_base 23: mod_base = OTHER; note = 2'-O-methylguanosine-3'-phosphate
actcagctccaaggaggctcctg

SEQ ID NO: 5113 - RNA, 23 nt, synthetic construct
  source 1..23: mol_type = other RNA
  modified_base 1: mod_base = OTHER; note = 2'-O-methyladenosine-3'- phosphorothioate
  modified_base 2: mod_base = OTHER; note = 2'-fluoroadenosine-3'-phosphorothioate
  modified_base 3: mod_base = OTHER; note = 2'-O-methyluridine-3'-phosphate
  modified_base 4: mod_base = OTHER; note = 2'-O-methyladenosine-3'-phosphate
  modified_base 5: mod_base = OTHER; note = 2'-O-methylguanosine-3'-phosphate
  modified_base 6: mod_base = OTHER; note = 2'-fluorocytidine-3'-phosphate
  modified_base 7: mod_base = OTHER; note = 2'-O-methyluridine-3'-phosphate
  modified_base 8: mod_base = OTHER; note = 2'-fluorouridine-3'-phosphate
  modified_base 9: mod_base = OTHER; note = 2'-fluorocytidine-3'-phosphate
  modified_base 10: mod_base = OTHER; note = 2'-O-methyladenosine-3'-phosphate
  modified_base 11: mod_base = OTHER; note = 2'-O-methylguanosine-3'-phosphate
  modified_base 12: mod_base = OTHER; note = 2'-O-methylcytidine-3'-phosphate
  modified_base 13: mod_base = OTHER; note = 2'-O-methylcytidine-3'-phosphate
  modified_base 14: mod_base = OTHER; note = 2'-fluoroadenosine-3'-phosphate
  modified_base 15: mod_base = OTHER; note = 2'-O-methylguanosine-3'-phosphate
  modified_base 16: mod_base = OTHER; note = 2'-fluorocytidine-3'-phosphate
  modified_base 17: mod_base = OTHER; note = 2'-O-methylcytidine-3'-phosphate
  modified_base 18: mod_base = OTHER; note = 2'-O-methyluridine-3'-phosphate
  modified_base 19: mod_base = OTHER; note = 2'-O-methylcytidine-3'-phosphate
  modified_base 20: mod_base = OTHER; note = 2'-O-methyluridine-3'-phosphate
  modified_base 21: mod_base = OTHER; note = 2'-O-methylcytidine-3'- phosphorothioate
  modified_base 22: mod_base = OTHER; note = 2'-O-methylguanosine-3'- phosphorothioate
  modified_base 23: mod_base = OTHER; note = 2'-O-methylguanosine-3'-phosphate
aatagcttcagccagcctctcgg

SEQ ID NO: 5114 - RNA, 23 nt, synthetic construct
  source 1..23: mol_type = other RNA
  modified_base 1: mod_base = OTHER; note = 2'-O-methyladenosine-3'- phosphorothioate
  modified_base 2: mod_base = OTHER; note = 2'-fluorocytidine-3'-phosphorothioate
  modified_base 3: mod_base = OTHER; note = 2'-O-methyladenosine-3'-phosphate
  modified_base 4: mod_base = OTHER; note = 2'-O-methylguanosine-3'-phosphate
  modified_base 5: mod_base = OTHER; note = 2'-O-methyladenosine-3'-phosphate
  modified_base 6: mod_base = OTHER; note = 2'-fluoroguanosine-3'-phosphate
  modified_base 7: mod_base = OTHER; note = 2'-O-methyluridine-3'-phosphate
  modified_base 8: mod_base = OTHER; note = 2'-fluorocytidine-3'-phosphate
  modified_base 9: mod_base = OTHER; note = 2'-fluorocytidine-3'-phosphate
  modified_base 10: mod_base = OTHER; note = 2'-O-methyladenosine-3'-phosphate
  modified_base 11: mod_base = OTHER; note = 2'-O-methyluridine-3'-phosphate
  modified_base 12: mod_base = OTHER; note = 2'-O-methyladenosine-3'-phosphate
  modified_base 13: mod_base = OTHER; note = 2'-O-methylguanosine-3'-phosphate
  modified_base 14: mod_base = OTHER; note = 2'-fluorocytidine-3'-phosphate
  modified_base 15: mod_base = OTHER; note = 2'-O-methyluridine-3'-phosphate
  modified_base 16: mod_base = OTHER; note = 2'-fluorouridine-3'-phosphate
  modified_base 17: mod_base = OTHER; note = 2'-O-methylcytidine-3'-phosphate
  modified_base 18: mod_base = OTHER; note = 2'-O-methyladenosine-3'-phosphate
  modified_base 19: mod_base = OTHER; note = 2'-O-methylguanosine-3'-phosphate
  modified_base 20: mod_base = OTHER; note = 2'-O-methylcytidine-3'-phosphate
  modified_base 21: mod_base = OTHER; note = 2'-O-methylcytidine-3'- phosphorothioate
  modified_base 22: mod_base = OTHER; note = 2'-O-methyladenosine-3'- phosphorothioate
  modified_base 23: mod_base = OTHER; note = 2'-O-methylguanosine-3'-phosphate
acagagtccatagcttcagccag

SEQ ID NO: 5115 - RNA, 23 nt, synthetic construct
  source 1..23: mol_type = other RNA
  modified_base 1: mod_base = OTHER; note = 2'-O-methyladenosine-3'- phosphorothioate
  modified_base 2: mod_base = OTHER; note = 2'-fluorouridine -3'-phosphorothioate
  modified_base 3: mod_base = OTHER; note = 2'-O-methyluridine-3'-phosphate
  modified_base 4: mod_base = OTHER; note = 2'-O-methylcytidine-3'-phosphate
  modified_base 5: mod_base = OTHER; note = 2'-O-methyluridine-3'-phosphate
  modified_base 6: mod_base = OTHER; note = 2'-fluoroguanosine-3'-phosphate
  modified_base 7: mod_base = OTHER; note = 2'-O-methylcytidine-3'-phosphate
  modified_base 8: mod_base = OTHER; note = 2'-fluorocytidine-3'-phosphate
  modified_base 9: mod_base = OTHER; note = 2'-fluorocytidine-3'-phosphate
  modified_base 10: mod_base = OTHER; note = 2'-O-methyladenosine-3'-phosphate
  modified_base 11: mod_base = OTHER; note = 2'-O-methylguanosine-3'-phosphate
  modified_base 12: mod_base = OTHER; note = 2'-O-methyladenosine-3'-phosphate
  modified_base 13: mod_base = OTHER; note = 2'-O-methylguanosine-3'-phosphate
  modified_base 14: mod_base = OTHER; note = 2'-fluorouridine-3'-phosphate
  modified_base 15: mod_base = OTHER; note = 2'-O-methylcytidine-3'-phosphate
  modified_base 16: mod_base = OTHER; note = 2'-fluorocytidine-3'-phosphate
  modified_base 17: mod_base = OTHER; note = 2'-O-methyladenosine-3'-phosphate
  modified_base 18: mod_base = OTHER; note = 2'-O-methyluridine-3'-phosphate
  modified_base 19: mod_base = OTHER; note = 2'-O-methyladenosine-3'-phosphate
  modified_base 20: mod_base = OTHER; note = 2'-O-methylguanosine-3'-phosphate
  modified_base 21: mod_base = OTHER; note = 2'-O-methylcytidine-3'- phosphorothioate
  modified_base 22: mod_base = OTHER; note = 2'-O-methyluridine-3'-phosphorothioate
  modified_base 23: mod_base = OTHER; note = 2'-O-methyluridine-3'-phosphate
attctgcccagagtccatagctt

SEQ ID NO: 5116 - RNA, 23 nt, synthetic construct
  source 1..23: mol_type = other RNA
  modified_base 1: mod_base = OTHER; note = 2'-O-methyladenosine-3'- phosphorothioate
  modified_base 2: mod_base = OTHER; note = 2'-fluorocytidine-3'-phosphorothioate
  modified_base 3: mod_base = OTHER; note = 2'-O-methylcytidine-3'-phosphate
  modified_base 4: mod_base = OTHER; note = 2'-O-methyluridine-3'-phosphate
  modified_base 5: mod_base = OTHER; note = 2'-O-methylguanosine-3'-phosphate
  modified_base 6: mod_base = OTHER; note = 2'-fluoroguanosine-3'-phosphate
  modified_base 7: mod_base = OTHER; note = 2'-O-methyladenosine-3'-phosphate
  modified_base 8: mod_base = OTHER; note = 2'-fluoroguanosine-3'-phosphate
  modified_base 9: mod_base = OTHER; note = 2'-fluoroguanosine-3'-phosphate
  modified_base 10: mod_base = OTHER; note = 2'-O-methyluridine-3'-phosphate
  modified_base 11: mod_base = OTHER; note = 2'-O-methyluridine-3'-phosphate
  modified_base 12: mod_base = OTHER; note = 2'-O-methylcytidine-3'-phosphate
  modified_base 13: mod_base = OTHER; note = 2'-O-methyluridine-3'-phosphate
  modified_base 14: mod_base = OTHER; note = 2'-fluoroguanosine-3'-phosphate
  modified_base 15: mod_base = OTHER; note = 2'-O-methylcytidine-3'-phosphate
  modified_base 16: mod_base = OTHER; note = 2'-fluorocytidine-3'-phosphate
  modified_base 17: mod_base = OTHER; note = 2'-O-methylcytidine-3'-phosphate
  modified_base 18: mod_base = OTHER; note = 2'-O-methyladenosine-3'-phosphate
  modified_base 19: mod_base = OTHER; note = 2'-O-methylguanosine-3'-phosphate
  modified_base 20: mod_base = OTHER; note = 2'-O-methyladenosine-3'-phosphate
  modified_base 21: mod_base = OTHER; note = 2'-O-methylguanosine-3'- phosphorothioate
  modified_base 22: mod_base = OTHER; note = 2'-O-methyluridine-3'-phosphorothioate
  modified_base 23: mod_base = OTHER; note = 2'-O-methylcytidine-3'-phosphate
acctggaggttctgcccagagtc

SEQ ID NO: 5117 - RNA, 23 nt, synthetic construct
  source 1..23: mol_type = other RNA
  modified_base 1: mod_base = OTHER; note = 2'-O-methyladenosine-3'- phosphorothioate
  modified_base 2: mod_base = OTHER; note = 2'-fluoroguanosine-3'-phosphorothioate
  modified_base 3: mod_base = OTHER; note = 2'-O-methylguanosine-3'-phosphate
  modified_base 4: mod_base = OTHER; note = 2'-O-methylcytidine-3'-phosphate
  modified_base 5: mod_base = OTHER; note = 2'-O-methyladenosine-3'-phosphate
  modified_base 6: mod_base = OTHER; note = 2'-fluoroguanosine-3'-phosphate
  modified_base 7: mod_base = OTHER; note = 2'-O-methylguanosine-3'-phosphate
  modified_base 8: mod_base = OTHER; note = 2'-fluoroadenosine-3'-phosphate
  modified_base 9: mod_base = OTHER; note = 2'-fluoroguanosine-3'-phosphate
  modified_base 10: mod_base = OTHER; note = 2'-O-methyladenosine-3'-phosphate
  modified_base 11: mod_base = OTHER; note = 2'-O-methylcytidine-3'-phosphate
  modified_base 12: mod_base = OTHER; note = 2'-O-methylcytidine-3'-phosphate
  modified_base 13: mod_base = OTHER; note = 2'-O-methyluridine-3'-phosphate
  modified_base 14: mod_base = OTHER; note = 2'-fluoroguanosine-3'-phosphate
  modified_base 15: mod_base = OTHER; note = 2'-O-methylguanosine-3'-phosphate
  modified_base 16: mod_base = OTHER; note = 2'-fluoroadenosine-3'-phosphate
  modified_base 17: mod_base = OTHER; note = 2'-O-methylguanosine-3'-phosphate
  modified_base 18: mod_base = OTHER; note = 2'-O-methylguanosine-3'-phosphate
  modified_base 19: mod_base = OTHER; note = 2'-O-methyluridine-3'-phosphate
  modified_base 20: mod_base = OTHER; note = 2'-O-methyluridine-3'-phosphate
  modified_base 21: mod_base = OTHER; note = 2'-O-methylcytidine-3'- phosphorothioate
  modified_base 22: mod_base = OTHER; note = 2'-O-methyluridine-3'-phosphorothioate
  modified_base 23: mod_base = OTHER; note = 2'-O-methylguanosine-3'-phosphate
aggcaggagacctggaggttctg

SEQ ID NO: 5118 - RNA, 23 nt, synthetic construct
  source 1..23: mol_type = other RNA
  modified_base 1: mod_base = OTHER; note = 2'-O-methyladenosine-3'- phosphorothioate
  modified_base 2: mod_base = OTHER; note = 2'-fluoroadenosine-3'-phosphorothioate
  modified_base 3: mod_base = OTHER; note = 2'-O-methyluridine-3'-phosphate
  modified_base 4: mod_base = OTHER; note = 2'-O-methyluridine-3'-phosphate
  modified_base 5: mod_base = OTHER; note = 2'-O-methylguanosine-3'-phosphate
  modified_base 6: mod_base = OTHER; note = 2'-fluoroadenosine-3'-phosphate
  modified_base 7: mod_base = OTHER; note = 2'-O-methylguanosine-3'-phosphate
  modified_base 8: mod_base = OTHER; note = 2'-fluoroguanosine-3'-phosphate
  modified_base 9: mod_base = OTHER; note = 2'-fluorocytidine-3'-phosphate
  modified_base 10: mod_base = OTHER; note = 2'-O-methyladenosine-3'-phosphate
  modified_base 11: mod_base = OTHER; note = 2'-O-methylguanosine-3'-phosphate
  modified_base 12: mod_base = OTHER; note = 2'-O-methylguanosine-3'-phosphate
  modified_base 13: mod_base = OTHER; note = 2'-O-methyladenosine-3'-phosphate
  modified_base 14: mod_base = OTHER; note = 2'-fluoroguanosine-3'-phosphate
  modified_base 15: mod_base = OTHER; note = 2'-O-methyladenosine-3'-phosphate
  modified_base 16: mod_base = OTHER; note = 2'-fluorocytidine-3'-phosphate
  modified_base 17: mod_base = OTHER; note = 2'-O-methylcytidine-3'-phosphate
  modified_base 18: mod_base = OTHER; note = 2'-O-methyluridine-3'-phosphate
  modified_base 19: mod_base = OTHER; note = 2'-O-methylguanosine-3'-phosphate
  modified_base 20: mod_base = OTHER; note = 2'-O-methylguanosine-3'-phosphate
  modified_base 21: mod_base = OTHER; note = 2'-O-methyladenosine-3'- phosphorothioate
  modified_base 22: mod_base = OTHER; note = 2'-O-methylguanosine-3'- phosphorothioate
  modified_base 23: mod_base = OTHER; note = 2'-O-methylguanosine-3'-phosphate
aattgaggcaggagacctggagg

SEQ ID NO: 5119 - RNA, 23 nt, synthetic construct
  source 1..23: mol_type = other RNA
  modified_base 1: mod_base = OTHER; note = 2'-O-methyladenosine-3'- phosphorothioate
  modified_base 2: mod_base = OTHER; note = 2'-fluorouridine -3'-phosphorothioate
  modified_base 3: mod_base = OTHER; note = 2'-O-methylguanosine-3'-phosphate
  modified_base 4: mod_base = OTHER; note = 2'-O-methylcytidine-3'-phosphate
  modified_base 5: mod_base = OTHER; note = 2'-O-methyluridine-3'-phosphate
  modified_base 6: mod_base = OTHER; note = 2'-fluorocytidine-3'-phosphate
  modified_base 7: mod_base = OTHER; note = 2'-O-methyladenosine-3'-phosphate
  modified_base 8: mod_base = OTHER; note = 2'-fluoroguanosine-3'-phosphate
  modified_base 9: mod_base = OTHER; note = 2'-fluorocytidine-3'-phosphate
  modified_base 10: mod_base = OTHER; note = 2'-O-methyladenosine-3'-phosphate
  modified_base 11: mod_base = OTHER; note = 2'-O-methyluridine-3'-phosphate
  modified_base 12: mod_base = OTHER; note = 2'-O-methyluridine-3'-phosphate
  modified_base 13: mod_base = OTHER; note = 2'-O-methylguanosine-3'-phosphate
  modified_base 14: mod_base = OTHER; note = 2'-fluoroadenosine-3'-phosphate
  modified_base 15: mod_base = OTHER; note = 2'-O-methylguanosine-3'-phosphate
  modified_base 16: mod_base = OTHER; note = 2'-fluoroguanosine-3'-phosphate
  modified_base 17: mod_base = OTHER; note = 2'-O-methylcytidine-3'-phosphate
  modified_base 18: mod_base = OTHER; note = 2'-O-methyladenosine-3'-phosphate
  modified_base 19: mod_base = OTHER; note = 2'-O-methylguanosine-3'-phosphate
  modified_base 20: mod_base = OTHER; note = 2'-O-methylguanosine-3'-phosphate
  modified_base 21: mod_base = OTHER; note = 2'-O-methyladenosine-3'- phosphorothioate
  modified_base 22: mod_base = OTHER; note = 2'-O-methylguanosine-3'- phosphorothioate
  modified_base 23: mod_base = OTHER; note = 2'-O-methyladenosine-3'-phosphate
atgctcagcattgaggcaggaga

SEQ ID NO: 5120 - RNA, 23 nt, synthetic construct
  source 1..23: mol_type = other RNA
  modified_base 1: mod_base = OTHER; note = 2'-O-methyladenosine-3'- phosphorothioate
  modified_base 2: mod_base = OTHER; note = 2'-fluorocytidine-3'-phosphorothioate
  modified_base 3: mod_base = OTHER; note = 2'-O-methyluridine-3'-phosphate
  modified_base 4: mod_base = OTHER; note = 2'-O-methylguanosine-3'-phosphate
  modified_base 5: mod_base = OTHER; note = 2'-O-methylguanosine-3'-phosphate
  modified_base 6: mod_base = OTHER; note = 2'-fluorouridine-3'-phosphate
  modified_base 7: mod_base = OTHER; note = 2'-O-methyluridine-3'-phosphate
  modified_base 8: mod_base = OTHER; note = 2'-fluorocytidine-3'-phosphate
  modified_base 9: mod_base = OTHER; note = 2'-fluorouridine-3'-phosphate
  modified_base 10: mod_base = OTHER; note = 2'-O-methylguanosine-3'-phosphate
  modified_base 11: mod_base = OTHER; note = 2'-O-methylcytidine-3'-phosphate
  modified_base 12: mod_base = OTHER; note = 2'-O-methyluridine-3'-phosphate
  modified_base 13: mod_base = OTHER; note = 2'-O-methylcytidine-3'-phosphate
  modified_base 14: mod_base = OTHER; note = 2'-fluoroadenosine-3'-phosphate
  modified_base 15: mod_base = OTHER; note = 2'-O-methylguanosine-3'-phosphate
  modified_base 16: mod_base = OTHER; note = 2'-fluorocytidine-3'-phosphate
  modified_base 17: mod_base = OTHER; note = 2'-O-methyladenosine-3'-phosphate
  modified_base 18: mod_base = OTHER; note = 2'-O-methyluridine-3'-phosphate
  modified_base 19: mod_base = OTHER; note = 2'-O-methyluridine-3'-phosphate
  modified_base 20: mod_base = OTHER; note = 2'-O-methylguanosine-3'-phosphate
  modified_base 21: mod_base = OTHER; note = 2'-O-methyladenosine-3'- phosphorothioate
  modified_base 22: mod_base = OTHER; note = 2'-O-methylguanosine-3'- phosphorothioate
  modified_base 23: mod_base = OTHER; note = 2'-O-methylguanosine-3'-phosphate
actggttctgctcagcattgagg

SEQ ID NO: 5121 - RNA, 23 nt, synthetic construct
  source 1..23: mol_type = other RNA
  modified_base 1: mod_base = OTHER; note = 2'-O-methyladenosine-3'- phosphorothioate
  modified_base 2: mod_base = OTHER; note = 2'-fluoroadenosine-3'-phosphorothioate
  modified_base 3: mod_base = OTHER; note = 2'-O-methylguanosine-3'-phosphate
  modified_base 4: mod_base = OTHER; note = 2'-O-methylguanosine-3'-phosphate
  modified_base 5: mod_base = OTHER; note = 2'-O-methyluridine-3'-phosphate
  modified_base 6: mod_base = OTHER; note = 2'-fluoroguanosine-3'-phosphate
  modified_base 7: mod_base = OTHER; note = 2'-O-methylcytidine-3'-phosphate
  modified_base 8: mod_base = OTHER; note = 2'-fluorouridine-3'-phosphate
  modified_base 9: mod_base = OTHER; note = 2'-fluoroguanosine-3'-phosphate
  modified_base 10: mod_base = OTHER; note = 2'-O-methylguanosine-3'-phosphate
  modified_base 11: mod_base = OTHER; note = 2'-O-methyluridine-3'-phosphate
  modified_base 12: mod_base = OTHER; note = 2'-O-methyluridine-3'-phosphate
  modified_base 13: mod_base = OTHER; note = 2'-O-methylcytidine-3'-phosphate
  modified_base 14: mod_base = OTHER; note = 2'-fluorouridine-3'-phosphate
  modified_base 15: mod_base = OTHER; note = 2'-O-methylguanosine-3'-phosphate
  modified_base 16: mod_base = OTHER; note = 2'-fluorocytidine-3'-phosphate
  modified_base 17: mod_base = OTHER; note = 2'-O-methyluridine-3'-phosphate
  modified_base 18: mod_base = OTHER; note = 2'-O-methylcytidine-3'-phosphate
  modified_base 19: mod_base = OTHER; note = 2'-O-methyladenosine-3'-phosphate
  modified_base 20: mod_base = OTHER; note = 2'-O-methylguanosine-3'-phosphate
  modified_base 21: mod_base = OTHER; note = 2'-O-methylcytidine-3'- phosphorothioate
  modified_base 22: mod_base = OTHER; note = 2'-O-methyladenosine-3'- phosphorothioate
  modified_base 23: mod_base = OTHER; note = 2'-O-methyluridine-3'-phosphate
aaggtgctggttctgctcagcat

SEQ ID NO: 5122 - RNA, 23 nt, synthetic construct
  source 1..23: mol_type = other RNA
  modified_base 1: mod_base = OTHER; note = 2'-O-methyladenosine-3'- phosphorothioate
  modified_base 2: mod_base = OTHER; note = 2'-fluorocytidine-3'-phosphorothioate
  modified_base 3: mod_base = OTHER; note = 2'-O-methyladenosine-3'-phosphate
  modified_base 4: mod_base = OTHER; note = 2'-O-methyluridine-3'-phosphate
  modified_base 5: mod_base = OTHER; note = 2'-O-methyladenosine-3'-phosphate
  modified_base 6: mod_base = OTHER; note = 2'-fluorocytidine-3'-phosphate
  modified_base 7: mod_base = OTHER; note = 2'-O-methyluridine-3'-phosphate
  modified_base 8: mod_base = OTHER; note = 2'-fluoroguanosine-3'-phosphate
  modified_base 9: mod_base = OTHER; note = 2'-fluorouridine-3'-phosphate
  modified_base 10: mod_base = OTHER; note = 2'-O-methylguanosine-3'-phosphate
  modified_base 11: mod_base = OTHER; note = 2'-O-methylcytidine-3'-phosphate
  modified_base 12: mod_base = OTHER; note = 2'-O-methylcytidine-3'-phosphate
  modified_base 13: mod_base = OTHER; note = 2'-O-methyladenosine-3'-phosphate
  modified_base 14: mod_base = OTHER; note = 2'-fluorocytidine-3'-phosphate
  modified_base 15: mod_base = OTHER; note = 2'-O-methylcytidine-3'-phosphate
  modified_base 16: mod_base = OTHER; note = 2'-fluorocytidine-3'-phosphate
  modified_base 17: mod_base = OTHER; note = 2'-O-methylguanosine-3'-phosphate
  modified_base 18: mod_base = OTHER; note = 2'-O-methyladenosine-3'-phosphate
  modified_base 19: mod_base = OTHER; note = 2'-O-methyluridine-3'-phosphate
  modified_base 20: mod_base = OTHER; note = 2'-O-methylguanosine-3'-phosphate
  modified_base 21: mod_base = OTHER; note = 2'-O-methylcytidine-3'- phosphorothioate
  modified_base 22: mod_base = OTHER; note = 2'-O-methyladenosine-3'- phosphorothioate
  modified_base 23: mod_base = OTHER; note = 2'-O-methylguanosine-3'-phosphate
acatactgtgccacccgatgcag

SEQ ID NO: 5123 - RNA, 23 nt, synthetic construct
  source 1..23: mol_type = other RNA
  modified_base 1: mod_base = OTHER; note = 2'-O-methyladenosine-3'- phosphorothioate
  modified_base 2: mod_base = OTHER; note = 2'-fluorouridine -3'-phosphorothioate
  modified_base 3: mod_base = OTHER; note = 2'-O-methyladenosine-3'-phosphate
  modified_base 4: mod_base = OTHER; note = 2'-O-methylcytidine-3'-phosphate
  modified_base 5: mod_base = OTHER; note = 2'-O-methyluridine-3'-phosphate
  modified_base 6: mod_base = OTHER; note = 2'-fluorocytidine-3'-phosphate
  modified_base 7: mod_base = OTHER; note = 2'-O-methylcytidine-3'-phosphate
  modified_base 8: mod_base = OTHER; note = 2'-fluoroguanosine-3'-phosphate
  modified_base 9: mod_base = OTHER; note = 2'-fluorocytidine-3'-phosphate
  modified_base 10: mod_base = OTHER; note = 2'-O-methyladenosine-3'-phosphate
  modified_base 11: mod_base = OTHER; note = 2'-O-methyluridine-3'-phosphate
  modified_base 12: mod_base = OTHER; note = 2'-O-methylcytidine-3'-phosphate
  modified_base 13: mod_base = OTHER; note = 2'-O-methylcytidine-3'-phosphate
  modified_base 14: mod_base = OTHER; note = 2'-fluoroadenosine-3'-phosphate
  modified_base 15: mod_base = OTHER; note = 2'-O-methylcytidine-3'-phosphate
  modified_base 16: mod_base = OTHER; note = 2'-fluorocytidine-3'-phosphate
  modified_base 17: mod_base = OTHER; note = 2'-O-methyladenosine-3'-phosphate
  modified_base 18: mod_base = OTHER; note = 2'-O-methylguanosine-3'-phosphate
  modified_base 19: mod_base = OTHER; note = 2'-O-methylguanosine-3'-phosphate
  modified_base 20: mod_base = OTHER; note = 2'-O-methyladenosine-3'-phosphate
  modified_base 21: mod_base = OTHER; note = 2'-O-methylguanosine-3'- phosphorothioate
  modified_base 22: mod_base = OTHER; note = 2'-O-methylcytidine-3'- phosphorothioate
  modified_base 23: mod_base = OTHER; note = 2'-O-methylcytidine-3'-phosphate
atactccgcatccaccaggagcc

SEQ ID NO: 5124 - RNA, 23 nt, synthetic construct
  source 1..23: mol_type = other RNA
  modified_base 1: mod_base = OTHER; note = 2'-O-methyladenosine-3'- phosphorothioate
  modified_base 2: mod_base = OTHER; note = 2'-fluorouridine -3'-phosphorothioate
  modified_base 3: mod_base = OTHER; note = 2'-O-methylguanosine-3'-phosphate
  modified_base 4: mod_base = OTHER; note = 2'-O-methyladenosine-3'-phosphate
  modified_base 5: mod_base = OTHER; note = 2'-O-methylguanosine-3'-phosphate
  modified_base 6: mod_base = OTHER; note = 2'-fluoroguanosine-3'-phosphate
  modified_base 7: mod_base = OTHER; note = 2'-O-methyluridine-3'-phosphate
  modified_base 8: mod_base = OTHER; note = 2'-fluoroguanosine-3'-phosphate
  modified_base 9: mod_base = OTHER; note = 2'-fluorouridine-3'-phosphate
  modified_base 10: mod_base = OTHER; note = 2'-O-methyladenosine-3'-phosphate
  modified_base 11: mod_base = OTHER; note = 2'-O-methylcytidine-3'-phosphate
  modified_base 12: mod_base = OTHER; note = 2'-O-methyluridine-3'-phosphate
  modified_base 13: mod_base = OTHER; note = 2'-O-methylcytidine-3'-phosphate
  modified_base 14: mod_base = OTHER; note = 2'-fluorocytidine-3'-phosphate
  modified_base 15: mod_base = OTHER; note = 2'-O-methylguanosine-3'-phosphate
  modified_base 16: mod_base = OTHER; note = 2'-fluorocytidine-3'-phosphate
  modified_base 17: mod_base = OTHER; note = 2'-O-methyladenosine-3'-phosphate
  modified_base 18: mod_base = OTHER; note = 2'-O-methyluridine-3'-phosphate
  modified_base 19: mod_base = OTHER; note = 2'-O-methylcytidine-3'-phosphate
  modified_base 20: mod_base = OTHER; note = 2'-O-methylcytidine-3'-phosphate
  modified_base 21: mod_base = OTHER; note = 2'-O-methyladenosine-3'- phosphorothioate
  modified_base 22: mod_base = OTHER; note = 2'-O-methylcytidine-3'- phosphorothioate
  modified_base 23: mod_base = OTHER; note = 2'-O-methylcytidine-3'-phosphate
atgaggtgtactccgcatccacc

SEQ ID NO: 5125 - RNA, 23 nt, synthetic construct
  source 1..23: mol_type = other RNA
  modified_base 1: mod_base = OTHER; note = 2'-O-methyladenosine-3'- phosphorothioate
  modified_base 2: mod_base = OTHER; note = 2'-fluorouridine -3'-phosphorothioate
  modified_base 3: mod_base = OTHER; note = 2'-O-methyluridine-3'-phosphate
  modified_base 4: mod_base = OTHER; note = 2'-O-methylcytidine-3'-phosphate
  modified_base 5: mod_base = OTHER; note = 2'-O-methyladenosine-3'-phosphate
  modified_base 6: mod_base = OTHER; note = 2'-fluoroguanosine-3'-phosphate
  modified_base 7: mod_base = OTHER; note = 2'-O-methyluridine-3'-phosphate
  modified_base 8: mod_base = OTHER; note = 2'-fluoroguanosine-3'-phosphate
  modified_base 9: mod_base = OTHER; note = 2'-fluoroadenosine-3'-phosphate
  modified_base 10: mod_base = OTHER; note = 2'-O-methylguanosine-3'-phosphate
  modified_base 11: mod_base = OTHER; note = 2'-O-methylguanosine-3'-phosphate
  modified_base 12: mod_base = OTHER; note = 2'-O-methyluridine-3'-phosphate
  modified_base 13: mod_base = OTHER; note = 2'-O-methylguanosine-3'-phosphate
  modified_base 14: mod_base = OTHER; note = 2'-fluorouridine-3'-phosphate
  modified_base 15: mod_base = OTHER; note = 2'-O-methyladenosine-3'-phosphate
  modified_base 16: mod_base = OTHER; note = 2'-fluorocytidine-3'-phosphate
  modified_base 17: mod_base = OTHER; note = 2'-O-methyluridine-3'-phosphate
  modified_base 18: mod_base = OTHER; note = 2'-O-methylcytidine-3'-phosphate
  modified_base 19: mod_base = OTHER; note = 2'-O-methylcytidine-3'-phosphate
  modified_base 20: mod_base = OTHER; note = 2'-O-methylguanosine-3'-phosphate
  modified_base 21: mod_base = OTHER; note = 2'-O-methylcytidine-3'- phosphorothioate
  modified_base 22: mod_base = OTHER; note = 2'-O-methyladenosine-3'- phosphorothioate
  modified_base 23: mod_base = OTHER; note = 2'-O-methyluridine-3'-phosphate
attcagtgaggtgtactccgcat

SEQ ID NO: 5126 - RNA, 23 nt, synthetic construct
  source 1..23: mol_type = other RNA
  modified_base 1: mod_base = OTHER; note = 2'-O-methyladenosine-3'- phosphorothioate
  modified_base 2: mod_base = OTHER; note = 2'-fluorocytidine-3'-phosphorothioate
  modified_base 3: mod_base = OTHER; note = 2'-O-methyladenosine-3'-phosphate
  modified_base 4: mod_base = OTHER; note = 2'-O-methylguanosine-3'-phosphate
  modified_base 5: mod_base = OTHER; note = 2'-O-methylguanosine-3'-phosphate
  modified_base 6: mod_base = OTHER; note = 2'-fluoroguanosine-3'-phosphate
  modified_base 7: mod_base = OTHER; note = 2'-O-methyluridine-3'-phosphate
  modified_base 8: mod_base = OTHER; note = 2'-fluorouridine-3'-phosphate
  modified_base 9: mod_base = OTHER; note = 2'-fluorocytidine-3'-phosphate
  modified_base 10: mod_base = OTHER; note = 2'-O-methyladenosine-3'-phosphate
  modified_base 11: mod_base = OTHER; note = 2'-O-methylguanosine-3'-phosphate
  modified_base 12: mod_base = OTHER; note = 2'-O-methyluridine-3'-phosphate
  modified_base 13: mod_base = OTHER; note = 2'-O-methylguanosine-3'-phosphate
  modified_base 14: mod_base = OTHER; note = 2'-fluoroadenosine-3'-phosphate
  modified_base 15: mod_base = OTHER; note = 2'-O-methylguanosine-3'-phosphate
  modified_base 16: mod_base = OTHER; note = 2'-fluoroguanosine-3'-phosphate
  modified_base 17: mod_base = OTHER; note = 2'-O-methyluridine-3'-phosphate
  modified_base 18: mod_base = OTHER; note = 2'-O-methylguanosine-3'-phosphate
  modified_base 19: mod_base = OTHER; note = 2'-O-methyluridine-3'-phosphate
  modified_base 20: mod_base = OTHER; note = 2'-O-methyladenosine-3'-phosphate
  modified_base 21: mod_base = OTHER; note = 2'-O-methylcytidine-3'- phosphorothioate
  modified_base 22: mod_base = OTHER; note = 2'-O-methyluridine-3'-phosphorothioate
  modified_base 23: mod_base = OTHER; note = 2'-O-methylcytidine-3'-phosphate
acagggttcagtgaggtgtactc

SEQ ID NO: 5127 - RNA, 23 nt, synthetic construct
  source 1..23: mol_type = other RNA
  modified_base 1: mod_base = OTHER; note = 2'-O-methyladenosine-3'- phosphorothioate
  modified_base 2: mod_base = OTHER; note = 2'-fluoroguanosine-3'-phosphorothioate
  modified_base 3: mod_base = OTHER; note = 2'-O-methyladenosine-3'-phosphate
  modified_base 4: mod_base = OTHER; note = 2'-O-methylguanosine-3'-phosphate
  modified_base 5: mod_base = OTHER; note = 2'-O-methyladenosine-3'-phosphate
  modified_base 6: mod_base = OTHER; note = 2'-fluoroguanosine-3'-phosphate
  modified_base 7: mod_base = OTHER; note = 2'-O-methylcytidine-3'-phosphate
  modified_base 8: mod_base = OTHER; note = 2'-fluoroguanosine-3'-phosphate
  modified_base 9: mod_base = OTHER; note = 2'-fluorocytidine-3'-phosphate
  modified_base 10: mod_base = OTHER; note = 2'-O-methyladenosine-3'-phosphate
  modified_base 11: mod_base = OTHER; note = 2'-O-methylguanosine-3'-phosphate
  modified_base 12: mod_base = OTHER; note = 2'-O-methylguanosine-3'-phosphate
  modified_base 13: mod_base = OTHER; note = 2'-O-methylguanosine-3'-phosphate
  modified_base 14: mod_base = OTHER; note = 2'-fluorouridine-3'-phosphate
  modified_base 15: mod_base = OTHER; note = 2'-O-methyluridine-3'-phosphate
  modified_base 16: mod_base = OTHER; note = 2'-fluorocytidine-3'-phosphate
  modified_base 17: mod_base = OTHER; note = 2'-O-methyladenosine-3'-phosphate
  modified_base 18: mod_base = OTHER; note = 2'-O-methylguanosine-3'-phosphate
  modified_base 19: mod_base = OTHER; note = 2'-O-methyluridine-3'-phosphate
  modified_base 20: mod_base = OTHER; note = 2'-O-methylguanosine-3'-phosphate
  modified_base 21: mod_base = OTHER; note = 2'-O-methyladenosine-3'- phosphorothioate
  modified_base 22: mod_base = OTHER; note = 2'-O-methylguanosine-3'- phosphorothioate
  modified_base 23: mod_base = OTHER; note = 2'-O-methylguanosine-3'-phosphate
agagagcgcagggttcagtgagg

SEQ ID NO: 5128 - RNA, 23 nt, synthetic construct
  source 1..23: mol_type = other RNA
  modified_base 1: mod_base = OTHER; note = 2'-O-methyladenosine-3'- phosphorothioate
  modified_base 2: mod_base = OTHER; note = 2'-fluoroadenosine-3'-phosphorothioate
  modified_base 3: mod_base = OTHER; note = 2'-O-methylguanosine-3'-phosphate
  modified_base 4: mod_base = OTHER; note = 2'-O-methylcytidine-3'-phosphate
  modified_base 5: mod_base = OTHER; note = 2'-O-methyladenosine-3'-phosphate
  modified_base 6: mod_base = OTHER; note = 2'-fluoroguanosine-3'-phosphate
  modified_base 7: mod_base = OTHER; note = 2'-O-methylcytidine-3'-phosphate
  modified_base 8: mod_base = OTHER; note = 2'-fluoroguanosine-3'-phosphate
  modified_base 9: mod_base = OTHER; note = 2'-fluoroadenosine-3'-phosphate
  modified_base 10: mod_base = OTHER; note = 2'-O-methylguanosine-3'-phosphate
  modified_base 11: mod_base = OTHER; note = 2'-O-methyladenosine-3'-phosphate
  modified_base 12: mod_base = OTHER; note = 2'-O-methylguanosine-3'-phosphate
  modified_base 13: mod_base = OTHER; note = 2'-O-methylcytidine-3'-phosphate
  modified_base 14: mod_base = OTHER; note = 2'-fluoroguanosine-3'-phosphate
  modified_base 15: mod_base = OTHER; note = 2'-O-methylcytidine-3'-phosphate
  modified_base 16: mod_base = OTHER; note = 2'-fluoroadenosine-3'-phosphate
  modified_base 17: mod_base = OTHER; note = 2'-O-methylguanosine-3'-phosphate
  modified_base 18: mod_base = OTHER; note = 2'-O-methylguanosine-3'-phosphate
  modified_base 19: mod_base = OTHER; note = 2'-O-methylguanosine-3'-phosphate
  modified_base 20: mod_base = OTHER; note = 2'-O-methyluridine-3'-phosphate
  modified_base 21: mod_base = OTHER; note = 2'-O-methyluridine-3'-phosphorothioate
  modified_base 22: mod_base = OTHER; note = 2'-O-methylcytidine-3'- phosphorothioate
  modified_base 23: mod_base = OTHER; note = 2'-O-methyladenosine-3'-phosphate
aagcagcgagagcgcagggttca

SEQ ID NO: 5129 - RNA, 23 nt, synthetic construct
  source 1..23: mol_type = other RNA
  modified_base 1: mod_base = OTHER; note = 2'-O-methyladenosine-3'- phosphorothioate
  modified_base 2: mod_base = OTHER; note = 2'-fluorouridine -3'-phosphorothioate
  modified_base 3: mod_base = OTHER; note = 2'-O-methyladenosine-3'-phosphate
  modified_base 4: mod_base = OTHER; note = 2'-O-methylguanosine-3'-phosphate
  modified_base 5: mod_base = OTHER; note = 2'-O-methylguanosine-3'-phosphate
  modified_base 6: mod_base = OTHER; note = 2'-fluorouridine-3'-phosphate
  modified_base 7: mod_base = OTHER; note = 2'-O-methylguanosine-3'-phosphate
  modified_base 8: mod_base = OTHER; note = 2'-fluorouridine-3'-phosphate
  modified_base 9: mod_base = OTHER; note = 2'-fluorouridine-3'-phosphate
  modified_base 10: mod_base = OTHER; note = 2'-O-methylcytidine-3'-phosphate
  modified_base 11: mod_base = OTHER; note = 2'-O-methylcytidine-3'-phosphate
  modified_base 12: mod_base = OTHER; note = 2'-O-methyladenosine-3'-phosphate
  modified_base 13: mod_base = OTHER; note = 2'-O-methylcytidine-3'-phosphate
  modified_base 14: mod_base = OTHER; note = 2'-fluoroadenosine-3'-phosphate
  modified_base 15: mod_base = OTHER; note = 2'-O-methylcytidine-3'-phosphate
  modified_base 16: mod_base = OTHER; note = 2'-fluorocytidine-3'-phosphate
  modified_base 17: mod_base = OTHER; note = 2'-O-methylcytidine-3'-phosphate
  modified_base 18: mod_base = OTHER; note = 2'-O-methyladenosine-3'-phosphate
  modified_base 19: mod_base = OTHER; note = 2'-O-methylguanosine-3'-phosphate
  modified_base 20: mod_base = OTHER; note = 2'-O-methylguanosine-3'-phosphate
  modified_base 21: mod_base = OTHER; note = 2'-O-methylguanosine-3'- phosphorothioate
  modified_base 22: mod_base = OTHER; note = 2'-O-methylcytidine-3'- phosphorothioate
  modified_base 23: mod_base = OTHER; note = 2'-O-methylcytidine-3'-phosphate
ataggtgttccacacccagggcc

SEQ ID NO: 5130 - RNA, 23 nt, synthetic construct
  source 1..23: mol_type = other RNA
  modified_base 1: mod_base = OTHER; note = 2'-O-methyladenosine-3'- phosphorothioate
  modified_base 2: mod_base = OTHER; note = 2'-fluorocytidine-3'-phosphorothioate
  modified_base 3: mod_base = OTHER; note = 2'-O-methylcytidine-3'-phosphate
  modified_base 4: mod_base = OTHER; note = 2'-O-methyluridine-3'-phosphate
  modified_base 5: mod_base = OTHER; note = 2'-O-methylguanosine-3'-phosphate
  modified_base 6: mod_base = OTHER; note = 2'-fluoroguanosine-3'-phosphate
  modified_base 7: mod_base = OTHER; note = 2'-O-methyluridine-3'-phosphate
  modified_base 8: mod_base = OTHER; note = 2'-fluoroadenosine-3'-phosphate
  modified_base 9: mod_base = OTHER; note = 2'-fluoroguanosine-3'-phosphate
  modified_base 10: mod_base = OTHER; note = 2'-O-methylguanosine-3'-phosphate
  modified_base 11: mod_base = OTHER; note = 2'-O-methyluridine-3'-phosphate
  modified_base 12: mod_base = OTHER; note = 2'-O-methylguanosine-3'-phosphate
  modified_base 13: mod_base = OTHER; note = 2'-O-methyluridine-3'-phosphate
  modified_base 14: mod_base = OTHER; note = 2'-fluorouridine-3'-phosphate
  modified_base 15: mod_base = OTHER; note = 2'-O-methylcytidine-3'-phosphate
  modified_base 16: mod_base = OTHER; note = 2'-fluorocytidine-3'-phosphate
  modified_base 17: mod_base = OTHER; note = 2'-O-methyladenosine-3'-phosphate
  modified_base 18: mod_base = OTHER; note = 2'-O-methylcytidine-3'-phosphate
  modified_base 19: mod_base = OTHER; note = 2'-O-methyladenosine-3'-phosphate
  modified_base 20: mod_base = OTHER; note = 2'-O-methylcytidine-3'-phosphate
  modified_base 21: mod_base = OTHER; note = 2'-O-methylcytidine-3'- phosphorothioate
  modified_base 22: mod_base = OTHER; note = 2'-O-methylcytidine-3'- phosphorothioate
  modified_base 23: mod_base = OTHER; note = 2'-O-methyladenosine-3'-phosphate
acctggtaggtgttccacaccca

SEQ ID NO: 5131 - RNA, 23 nt, synthetic construct
  source 1..23: mol_type = other RNA
  modified_base 1: mod_base = OTHER; note = 2'-O-methyladenosine-3'- phosphorothioate
  modified_base 2: mod_base = OTHER; note = 2'-fluorouridine -3'-phosphorothioate
  modified_base 3: mod_base = OTHER; note = 2'-O-methyluridine-3'-phosphate
  modified_base 4: mod_base = OTHER; note = 2'-O-methyluridine-3'-phosphate
  modified_base 5: mod_base = OTHER; note = 2'-O-methyladenosine-3'-phosphate
  modified_base 6: mod_base = OTHER; note = 2'-fluoroguanosine-3'-phosphate
  modified_base 7: mod_base = OTHER; note = 2'-O-methyladenosine-3'-phosphate
  modified_base 8: mod_base = OTHER; note = 2'-fluorocytidine-3'-phosphate
  modified_base 9: mod_base = OTHER; note = 2'-fluoroadenosine-3'-phosphate
  modified_base 10: mod_base = OTHER; note = 2'-O-methylguanosine-3'-phosphate
  modified_base 11: mod_base = OTHER; note = 2'-O-methylguanosine-3'-phosphate
  modified_base 12: mod_base = OTHER; note = 2'-O-methylcytidine-3'-phosphate
  modified_base 13: mod_base = OTHER; note = 2'-O-methylcytidine-3'-phosphate
  modified_base 14: mod_base = OTHER; note = 2'-fluorouridine-3'-phosphate
  modified_base 15: mod_base = OTHER; note = 2'-O-methylguanosine-3'-phosphate
  modified_base 16: mod_base = OTHER; note = 2'-fluoroguanosine-3'-phosphate
  modified_base 17: mod_base = OTHER; note = 2'-O-methyluridine-3'-phosphate
  modified_base 18: mod_base = OTHER; note = 2'-O-methyladenosine-3'-phosphate
  modified_base 19: mod_base = OTHER; note = 2'-O-methylguanosine-3'-phosphate
  modified_base 20: mod_base = OTHER; note = 2'-O-methylguanosine-3'-phosphate
  modified_base 21: mod_base = OTHER; note = 2'-O-methyluridine-3'-phosphorothioate
  modified_base 22: mod_base = OTHER; note = 2'-O-methylguanosine-3'- phosphorothioate
  modified_base 23: mod_base = OTHER; note = 2'-O-methyluridine-3'-phosphate
atttagacaggcctggtaggtgt

SEQ ID NO: 5132 - RNA, 23 nt, synthetic construct
  source 1..23: mol_type = other RNA
  modified_base 1: mod_base = OTHER; note = 2'-O-methyladenosine-3'- phosphorothioate
  modified_base 2: mod_base = OTHER; note = 2'-fluoroadenosine-3'-phosphorothioate
  modified_base 3: mod_base = OTHER; note = 2'-O-methyladenosine-3'-phosphate
  modified_base 4: mod_base = OTHER; note = 2'-O-methyluridine-3'-phosphate
  modified_base 5: mod_base = OTHER; note = 2'-O-methylguanosine-3'-phosphate
  modified_base 6: mod_base = OTHER; note = 2'-fluorouridine-3'-phosphate
  modified_base 7: mod_base = OTHER; note = 2'-O-methylguanosine-3'-phosphate
  modified_base 8: mod_base = OTHER; note = 2'-fluorouridine-3'-phosphate
  modified_base 9: mod_base = OTHER; note = 2'-fluorocytidine-3'-phosphate
  modified_base 10: mod_base = OTHER; note = 2'-O-methylcytidine-3'-phosphate
  modified_base 11: mod_base = OTHER; note = 2'-O-methyluridine-3'-phosphate
  modified_base 12: mod_base = OTHER; note = 2'-O-methyluridine-3'-phosphate
  modified_base 13: mod_base = OTHER; note = 2'-O-methyluridine-3'-phosphate
  modified_base 14: mod_base = OTHER; note = 2'-fluoroadenosine-3'-phosphate
  modified_base 15: mod_base = OTHER; note = 2'-O-methylguanosine-3'-phosphate
  modified_base 16: mod_base = OTHER; note = 2'-fluoroadenosine-3'-phosphate
  modified_base 17: mod_base = OTHER; note = 2'-O-methylcytidine-3'-phosphate
  modified_base 18: mod_base = OTHER; note = 2'-O-methyladenosine-3'-phosphate
  modified_base 19: mod_base = OTHER; note = 2'-O-methylguanosine-3'-phosphate
  modified_base 20: mod_base = OTHER; note = 2'-O-methylguanosine-3'-phosphate
  modified_base 21: mod_base = OTHER; note = 2'-O-methylcytidine-3'- phosphorothioate
  modified_base 22: mod_base = OTHER; note = 2'-O-methylcytidine-3'- phosphorothioate
  modified_base 23: mod_base = OTHER; note = 2'-O-methyluridine-3'-phosphate
aaatgtgtcctttagacaggcct

SEQ ID NO: 5133 - RNA, 23 nt, synthetic construct
  source 1..23: mol_type = other RNA
  modified_base 1: mod_base = OTHER; note = 2'-O-methyladenosine-3'- phosphorothioate
  modified_base 2: mod_base = OTHER; note = 2'-fluoroguanosine-3'-phosphorothioate
  modified_base 3: mod_base = OTHER; note = 2'-O-methylcytidine-3'-phosphate
  modified_base 4: mod_base = OTHER; note = 2'-O-methyluridine-3'-phosphate
  modified_base 5: mod_base = OTHER; note = 2'-O-methylcytidine-3'-phosphate
  modified_base 6: mod_base = OTHER; note = 2'-fluoroguanosine-3'-phosphate
  modified_base 7: mod_base = OTHER; note = 2'-O-methyladenosine-3'-phosphate
  modified_base 8: mod_base = OTHER; note = 2'-fluoroadenosine-3'-phosphate
  modified_base 9: mod_base = OTHER; note = 2'-fluorouridine-3'-phosphate
  modified_base 10: mod_base = OTHER; note = 2'-O-methylguanosine-3'-phosphate
  modified_base 11: mod_base = OTHER; note = 2'-O-methyluridine-3'-phosphate
  modified_base 12: mod_base = OTHER; note = 2'-O-methylguanosine-3'-phosphate
  modified_base 13: mod_base = OTHER; note = 2'-O-methyluridine-3'-phosphate
  modified_base 14: mod_base = OTHER; note = 2'-fluorocytidine-3'-phosphate
  modified_base 15: mod_base = OTHER; note = 2'-O-methylcytidine-3'-phosphate
  modified_base 16: mod_base = OTHER; note = 2'-fluorouridine-3'-phosphate
  modified_base 17: mod_base = OTHER; note = 2'-O-methyluridine-3'-phosphate
  modified_base 18: mod_base = OTHER; note = 2'-O-methyluridine-3'-phosphate
  modified_base 19: mod_base = OTHER; note = 2'-O-methyladenosine-3'-phosphate
  modified_base 20: mod_base = OTHER; note = 2'-O-methylguanosine-3'-phosphate
  modified_base 21: mod_base = OTHER; note = 2'-O-methyladenosine-3'- phosphorothioate
  modified_base 22: mod_base = OTHER; note = 2'-O-methylcytidine-3'- phosphorothioate
  modified_base 23: mod_base = OTHER; note = 2'-O-methyladenosine-3'-phosphate
agctcgaatgtgtcctttagaca

SEQ ID NO: 5134 - RNA, 23 nt, synthetic construct
  source 1..23: mol_type = other RNA
  modified_base 1: mod_base = OTHER; note = 2'-O-methyladenosine-3'- phosphorothioate
  modified_base 2: mod_base = OTHER; note = 2'-fluorocytidine-3'-phosphorothioate
  modified_base 3: mod_base = OTHER; note = 2'-O-methylcytidine-3'-phosphate
  modified_base 4: mod_base = OTHER; note = 2'-O-methyladenosine-3'-phosphate
  modified_base 5: mod_base = OTHER; note = 2'-O-methylguanosine-3'-phosphate
  modified_base 6: mod_base = OTHER; note = 2'-fluorocytidine-3'-phosphate
  modified_base 7: mod_base = OTHER; note = 2'-O-methylcytidine-3'-phosphate
  modified_base 8: mod_base = OTHER; note = 2'-fluoroguanosine-3'-phosphate
  modified_base 9: mod_base = OTHER; note = 2'-fluorocytidine-3'-phosphate
  modified_base 10: mod_base = OTHER; note = 2'-O-methyluridine-3'-phosphate
  modified_base 11: mod_base = OTHER; note = 2'-O-methylcytidine-3'-phosphate
  modified_base 12: mod_base = OTHER; note = 2'-O-methylguanosine-3'-phosphate
  modified_base 13: mod_base = OTHER; note = 2'-O-methyladenosine-3'-phosphate
  modified_base 14: mod_base = OTHER; note = 2'-fluoroadenosine-3'-phosphate
  modified_base 15: mod_base = OTHER; note = 2'-O-methyluridine-3'-phosphate
  modified_base 16: mod_base = OTHER; note = 2'-fluoroguanosine-3'-phosphate
  modified_base 17: mod_base = OTHER; note = 2'-O-methyluridine-3'-phosphate
  modified_base 18: mod_base = OTHER; note = 2'-O-methylguanosine-3'-phosphate
  modified_base 19: mod_base = OTHER; note = 2'-O-methyluridine-3'-phosphate
  modified_base 20: mod_base = OTHER; note = 2'-O-methylcytidine-3'-phosphate
  modified_base 21: mod_base = OTHER; note = 2'-O-methylcytidine-3'- phosphorothioate
  modified_base 22: mod_base = OTHER; note = 2'-O-methyluridine-3'-phosphorothioate
  modified_base 23: mod_base = OTHER; note = 2'-O-methyluridine-3'-phosphate
accagccgctcgaatgtgtcctt

SEQ ID NO: 5135 - RNA, 23 nt, synthetic construct
  source 1..23: mol_type = other RNA
  modified_base 1: mod_base = OTHER; note = 2'-O-methyladenosine-3'- phosphorothioate
  modified_base 2: mod_base = OTHER; note = 2'-fluorocytidine-3'-phosphorothioate
  modified_base 3: mod_base = OTHER; note = 2'-O-methylcytidine-3'-phosphate
  modified_base 4: mod_base = OTHER; note = 2'-O-methyladenosine-3'-phosphate
  modified_base 5: mod_base = OTHER; note = 2'-O-methylguanosine-3'-phosphate
  modified_base 6: mod_base = OTHER; note = 2'-fluorocytidine-3'-phosphate
  modified_base 7: mod_base = OTHER; note = 2'-O-methyluridine-3'-phosphate
  modified_base 8: mod_base = OTHER; note = 2'-fluorouridine-3'-phosphate
  modified_base 9: mod_base = OTHER; note = 2'-fluorocytidine-3'-phosphate
  modified_base 10: mod_base = OTHER; note = 2'-O-methyladenosine-3'-phosphate
  modified_base 11: mod_base = OTHER; note = 2'-O-methylcytidine-3'-phosphate
  modified_base 12: mod_base = OTHER; note = 2'-O-methyluridine-3'-phosphate
  modified_base 13: mod_base = OTHER; note = 2'-O-methylcytidine-3'-phosphate
  modified_base 14: mod_base = OTHER; note = 2'-fluorocytidine-3'-phosphate
  modified_base 15: mod_base = OTHER; note = 2'-O-methylguanosine-3'-phosphate
  modified_base 16: mod_base = OTHER; note = 2'-fluoroadenosine-3'-phosphate
  modified_base 17: mod_base = OTHER; note = 2'-O-methyladenosine-3'-phosphate
  modified_base 18: mod_base = OTHER; note = 2'-O-methylguanosine-3'-phosphate
  modified_base 19: mod_base = OTHER; note = 2'-O-methylguanosine-3'-phosphate
  modified_base 20: mod_base = OTHER; note = 2'-O-methylcytidine-3'-phosphate
  modified_base 21: mod_base = OTHER; note = 2'-O-methylcytidine-3'- phosphorothioate
  modified_base 22: mod_base = OTHER; note = 2'-O-methyladenosine-3'- phosphorothioate
  modified_base 23: mod_base = OTHER; note = 2'-O-methylguanosine-3'-phosphate
accagcttcactccgaaggccag

SEQ ID NO: 5136 - RNA, 23 nt, synthetic construct
  source 1..23: mol_type = other RNA
  modified_base 1: mod_base = OTHER; note = 2'-O-methyladenosine-3'- phosphorothioate
  modified_base 2: mod_base = OTHER; note = 2'-fluorocytidine-3'-phosphorothioate
  modified_base 3: mod_base = OTHER; note = 2'-O-methyluridine-3'-phosphate
  modified_base 4: mod_base = OTHER; note = 2'-O-methylcytidine-3'-phosphate
  modified_base 5: mod_base = OTHER; note = 2'-O-methylguanosine-3'-phosphate
  modified_base 6: mod_base = OTHER; note = 2'-fluorouridine-3'-phosphate
  modified_base 7: mod_base = OTHER; note = 2'-O-methyladenosine-3'-phosphate
  modified_base 8: mod_base = OTHER; note = 2'-fluorocytidine-3'-phosphate
  modified_base 9: mod_base = OTHER; note = 2'-fluorocytidine-3'-phosphate
  modified_base 10: mod_base = OTHER; note = 2'-O-methyladenosine-3'-phosphate
  modified_base 11: mod_base = OTHER; note = 2'-O-methylguanosine-3'-phosphate
  modified_base 12: mod_base = OTHER; note = 2'-O-methylcytidine-3'-phosphate
  modified_base 13: mod_base = OTHER; note = 2'-O-methyluridine-3'-phosphate
  modified_base 14: mod_base = OTHER; note = 2'-fluorouridine-3'-phosphate
  modified_base 15: mod_base = OTHER; note = 2'-O-methylcytidine-3'-phosphate
  modified_base 16: mod_base = OTHER; note = 2'-fluoroadenosine-3'-phosphate
  modified_base 17: mod_base = OTHER; note = 2'-O-methylcytidine-3'-phosphate
  modified_base 18: mod_base = OTHER; note = 2'-O-methyluridine-3'-phosphate
  modified_base 19: mod_base = OTHER; note = 2'-O-methylcytidine-3'-phosphate
  modified_base 20: mod_base = OTHER; note = 2'-O-methylcytidine-3'-phosphate
  modified_base 21: mod_base = OTHER; note = 2'-O-methylguanosine-3'- phosphorothioate
  modified_base 22: mod_base = OTHER; note = 2'-O-methyladenosine-3'- phosphorothioate
  modified_base 23: mod_base = OTHER; note = 2'-O-methyladenosine-3'-phosphate
actcgtaccagcttcactccgaa

SEQ ID NO: 5137 - RNA, 23 nt, synthetic construct
  source 1..23: mol_type = other RNA
  modified_base 1: mod_base = OTHER; note = 2'-O-methyladenosine-3'- phosphorothioate
  modified_base 2: mod_base = OTHER; note = 2'-fluorouridine -3'-phosphorothioate
  modified_base 3: mod_base = OTHER; note = 2'-O-methylguanosine-3'-phosphate
  modified_base 4: mod_base = OTHER; note = 2'-O-methylcytidine-3'-phosphate
  modified_base 5: mod_base = OTHER; note = 2'-O-methyladenosine-3'-phosphate
  modified_base 6: mod_base = OTHER; note = 2'-fluorocytidine-3'-phosphate
  modified_base 7: mod_base = OTHER; note = 2'-O-methylcytidine-3'-phosphate
  modified_base 8: mod_base = OTHER; note = 2'-fluorouridine-3'-phosphate
  modified_base 9: mod_base = OTHER; note = 2'-fluorocytidine-3'-phosphate
  modified_base 10: mod_base = OTHER; note = 2'-O-methylguanosine-3'-phosphate
  modified_base 11: mod_base = OTHER; note = 2'-O-methyluridine-3'-phosphate
  modified_base 12: mod_base = OTHER; note = 2'-O-methyladenosine-3'-phosphate
  modified_base 13: mod_base = OTHER; note = 2'-O-methylcytidine-3'-phosphate
  modified_base 14: mod_base = OTHER; note = 2'-fluorocytidine-3'-phosphate
  modified_base 15: mod_base = OTHER; note = 2'-O-methyladenosine-3'-phosphate
  modified_base 16: mod_base = OTHER; note = 2'-fluoroguanosine-3'-phosphate
  modified_base 17: mod_base = OTHER; note = 2'-O-methylcytidine-3'-phosphate
  modified_base 18: mod_base = OTHER; note = 2'-O-methyluridine-3'-phosphate
  modified_base 19: mod_base = OTHER; note = 2'-O-methyluridine-3'-phosphate
  modified_base 20: mod_base = OTHER; note = 2'-O-methylcytidine-3'-phosphate
  modified_base 21: mod_base = OTHER; note = 2'-O-methyladenosine-3'- phosphorothioate
  modified_base 22: mod_base = OTHER; note = 2'-O-methylcytidine-3'- phosphorothioate
  modified_base 23: mod_base = OTHER; note = 2'-O-methyluridine-3'-phosphate
atgcacctcgtaccagcttcact

SEQ ID NO: 5138 - RNA, 23 nt, synthetic construct
  source 1..23: mol_type = other RNA
  modified_base 1: mod_base = OTHER; note = 2'-O-methyladenosine-3'- phosphorothioate
  modified_base 2: mod_base = OTHER; note = 2'-fluoroadenosine-3'-phosphorothioate
  modified_base 3: mod_base = OTHER; note = 2'-O-methylguanosine-3'-phosphate
  modified_base 4: mod_base = OTHER; note = 2'-O-methyladenosine-3'-phosphate
  modified_base 5: mod_base = OTHER; note = 2'-O-methyluridine-3'-phosphate
  modified_base 6: mod_base = OTHER; note = 2'-fluoroadenosine-3'-phosphate
  modified_base 7: mod_base = OTHER; note = 2'-O-methyluridine-3'-phosphate
  modified_base 8: mod_base = OTHER; note = 2'-fluoroguanosine-3'-phosphate
  modified_base 9: mod_base = OTHER; note = 2'-fluorocytidine-3'-phosphate
  modified_base 10: mod_base = OTHER; note = 2'-O-methyladenosine-3'-phosphate
  modified_base 11: mod_base = OTHER; note = 2'-O-methylcytidine-3'-phosphate
  modified_base 12: mod_base = OTHER; note = 2'-O-methylcytidine-3'-phosphate
  modified_base 13: mod_base = OTHER; note = 2'-O-methyluridine-3'-phosphate
  modified_base 14: mod_base = OTHER; note = 2'-fluorocytidine-3'-phosphate
  modified_base 15: mod_base = OTHER; note = 2'-O-methylguanosine-3'-phosphate
  modified_base 16: mod_base = OTHER; note = 2'-fluorouridine-3'-phosphate
  modified_base 17: mod_base = OTHER; note = 2'-O-methyladenosine-3'-phosphate
  modified_base 18: mod_base = OTHER; note = 2'-O-methylcytidine-3'-phosphate
  modified_base 19: mod_base = OTHER; note = 2'-O-methylcytidine-3'-phosphate
  modified_base 20: mod_base = OTHER; note = 2'-O-methyladenosine-3'-phosphate
  modified_base 21: mod_base = OTHER; note = 2'-O-methylguanosine-3'- phosphorothioate
  modified_base 22: mod_base = OTHER; note = 2'-O-methylcytidine-3'- phosphorothioate
  modified_base 23: mod_base = OTHER; note = 2'-O-methyluridine-3'-phosphate
aagatatgcacctcgtaccagct

SEQ ID NO: 5139 - RNA, 23 nt, synthetic construct
  source 1..23: mol_type = other RNA
  modified_base 1: mod_base = OTHER; note = 2'-O-methyladenosine-3'- phosphorothioate
  modified_base 2: mod_base = OTHER; note = 2'-fluorocytidine-3'-phosphorothioate
  modified_base 3: mod_base = OTHER; note = 2'-O-methyluridine-3'-phosphate
  modified_base 4: mod_base = OTHER; note = 2'-O-methyluridine-3'-phosphate
  modified_base 5: mod_base = OTHER; note = 2'-O-methylguanosine-3'-phosphate
  modified_base 6: mod_base = OTHER; note = 2'-fluorouridine-3'-phosphate
  modified_base 7: mod_base = OTHER; note = 2'-O-methylcytidine-3'-phosphate
  modified_base 8: mod_base = OTHER; note = 2'-fluorocytidine-3'-phosphate
  modified_base 9: mod_base = OTHER; note = 2'-fluoroadenosine-3'-phosphate
  modified_base 10: mod_base = OTHER; note = 2'-O-methylguanosine-3'-phosphate
  modified_base 11: mod_base = OTHER; note = 2'-O-methyladenosine-3'-phosphate
  modified_base 12: mod_base = OTHER; note = 2'-O-methyluridine-3'-phosphate
  modified_base 13: mod_base = OTHER; note = 2'-O-methyladenosine-3'-phosphate
  modified_base 14: mod_base = OTHER; note = 2'-fluorouridine-3'-phosphate
  modified_base 15: mod_base = OTHER; note = 2'-O-methylguanosine-3'-phosphate
  modified_base 16: mod_base = OTHER; note = 2'-fluorocytidine-3'-phosphate
  modified_base 17: mod_base = OTHER; note = 2'-O-methyladenosine-3'-phosphate
  modified_base 18: mod_base = OTHER; note = 2'-O-methylcytidine-3'-phosphate
  modified_base 19: mod_base = OTHER; note = 2'-O-methylcytidine-3'-phosphate
  modified_base 20: mod_base = OTHER; note = 2'-O-methyluridine-3'-phosphate
  modified_base 21: mod_base = OTHER; note = 2'-O-methylcytidine-3'- phosphorothioate
  modified_base 22: mod_base = OTHER; note = 2'-O-methylguanosine-3'- phosphorothioate
  modified_base 23: mod_base = OTHER; note = 2'-O-methyluridine-3'-phosphate
acttgtccagatatgcacctcgt

SEQ ID NO: 5140 - RNA, 23 nt, synthetic construct
  source 1..23: mol_type = other RNA
  modified_base 1: mod_base = OTHER; note = 2'-O-methyladenosine-3'- phosphorothioate
  modified_base 2: mod_base = OTHER; note = 2'-fluorouridine -3'-phosphorothioate
  modified_base 3: mod_base = OTHER; note = 2'-O-methylcytidine-3'-phosphate
  modified_base 4: mod_base = OTHER; note = 2'-O-methyluridine-3'-phosphate
  modified_base 5: mod_base = OTHER; note = 2'-O-methylcytidine-3'-phosphate
  modified_base 6: mod_base = OTHER; note = 2'-fluorouridine-3'-phosphate
  modified_base 7: mod_base = OTHER; note = 2'-O-methylcytidine-3'-phosphate
  modified_base 8: mod_base = OTHER; note = 2'-fluorocytidine-3'-phosphate
  modified_base 9: mod_base = OTHER; note = 2'-fluorouridine-3'-phosphate
  modified_base 10: mod_base = OTHER; note = 2'-O-methyluridine-3'-phosphate
  modified_base 11: mod_base = OTHER; note = 2'-O-methylguanosine-3'-phosphate
  modified_base 12: mod_base = OTHER; note = 2'-O-methyluridine-3'-phosphate
  modified_base 13: mod_base = OTHER; note = 2'-O-methylcytidine-3'-phosphate
  modified_base 14: mod_base = OTHER; note = 2'-fluorocytidine-3'-phosphate
  modified_base 15: mod_base = OTHER; note = 2'-O-methyladenosine-3'-phosphate
  modified_base 16: mod_base = OTHER; note = 2'-fluoroguanosine-3'-phosphate
  modified_base 17: mod_base = OTHER; note = 2'-O-methyladenosine-3'-phosphate
  modified_base 18: mod_base = OTHER; note = 2'-O-methyluridine-3'-phosphate
  modified_base 19: mod_base = OTHER; note = 2'-O-methyladenosine-3'-phosphate
  modified_base 20: mod_base = OTHER; note = 2'-O-methyluridine-3'-phosphate
  modified_base 21: mod_base = OTHER; note = 2'-O-methylguanosine-3'- phosphorothioate
  modified_base 22: mod_base = OTHER; note = 2'-O-methylcytidine-3'- phosphorothioate
  modified_base 23: mod_base = OTHER; note = 2'-O-methyladenosine-3'-phosphate
atctctccttgtccagatatgca

SEQ ID NO: 5141 - RNA, 23 nt, synthetic construct
  source 1..23: mol_type = other RNA
  modified_base 1: mod_base = OTHER; note = 2'-O-methyladenosine-3'- phosphorothioate
  modified_base 2: mod_base = OTHER; note = 2'-fluoroadenosine-3'-phosphorothioate
  modified_base 3: mod_base = OTHER; note = 2'-O-methylcytidine-3'-phosphate
  modified_base 4: mod_base = OTHER; note = 2'-O-methylcytidine-3'-phosphate
  modified_base 5: mod_base = OTHER; note = 2'-O-methylguanosine-3'-phosphate
  modified_base 6: mod_base = OTHER; note = 2'-fluorocytidine-3'-phosphate
  modified_base 7: mod_base = OTHER; note = 2'-O-methyluridine-3'-phosphate
  modified_base 8: mod_base = OTHER; note = 2'-fluorocytidine-3'-phosphate
  modified_base 9: mod_base = OTHER; note = 2'-fluorouridine-3'-phosphate
  modified_base 10: mod_base = OTHER; note = 2'-O-methylcytidine-3'-phosphate
  modified_base 11: mod_base = OTHER; note = 2'-O-methyluridine-3'-phosphate
  modified_base 12: mod_base = OTHER; note = 2'-O-methylcytidine-3'-phosphate
  modified_base 13: mod_base = OTHER; note = 2'-O-methylcytidine-3'-phosphate
  modified_base 14: mod_base = OTHER; note = 2'-fluorouridine-3'-phosphate
  modified_base 15: mod_base = OTHER; note = 2'-O-methyluridine-3'-phosphate
  modified_base 16: mod_base = OTHER; note = 2'-fluoroguanosine-3'-phosphate
  modified_base 17: mod_base = OTHER; note = 2'-O-methyluridine-3'-phosphate
  modified_base 18: mod_base = OTHER; note = 2'-O-methylcytidine-3'-phosphate
  modified_base 19: mod_base = OTHER; note = 2'-O-methylcytidine-3'-phosphate
  modified_base 20: mod_base = OTHER; note = 2'-O-methyladenosine-3'-phosphate
  modified_base 21: mod_base = OTHER; note = 2'-O-methylguanosine-3'- phosphorothioate
  modified_base 22: mod_base = OTHER; note = 2'-O-methyladenosine-3'- phosphorothioate
  modified_base 23: mod_base = OTHER; note = 2'-O-methyluridine-3'-phosphate
aaccgctctctccttgtccagat

SEQ ID NO: 5142 - RNA, 23 nt, synthetic construct
  source 1..23: mol_type = other RNA
  modified_base 1: mod_base = OTHER; note = 2'-O-methyladenosine-3'- phosphorothioate
  modified_base 2: mod_base = OTHER; note = 2'-fluorouridine -3'-phosphorothioate
  modified_base 3: mod_base = OTHER; note = 2'-O-methylcytidine-3'-phosphate
  modified_base 4: mod_base = OTHER; note = 2'-O-methylcytidine-3'-phosphate
  modified_base 5: mod_base = OTHER; note = 2'-O-methyladenosine-3'-phosphate
  modified_base 6: mod_base = OTHER; note = 2'-fluorouridine-3'-phosphate
  modified_base 7: mod_base = OTHER; note = 2'-O-methylcytidine-3'-phosphate
  modified_base 8: mod_base = OTHER; note = 2'-fluorocytidine-3'-phosphate
  modified_base 9: mod_base = OTHER; note = 2'-fluorocytidine-3'-phosphate
  modified_base 10: mod_base = OTHER; note = 2'-O-methyladenosine-3'-phosphate
  modified_base 11: mod_base = OTHER; note = 2'-O-methyluridine-3'-phosphate
  modified_base 12: mod_base = OTHER; note = 2'-O-methylguanosine-3'-phosphate
  modified_base 13: mod_base = OTHER; note = 2'-O-methylguanosine-3'-phosphate
  modified_base 14: mod_base = OTHER; note = 2'-fluoroadenosine-3'-phosphate
  modified_base 15: mod_base = OTHER; note = 2'-O-methylguanosine-3'-phosphate
  modified_base 16: mod_base = OTHER; note = 2'-fluorocytidine-3'-phosphate
  modified_base 17: mod_base = OTHER; note = 2'-O-methyluridine-3'-phosphate
  modified_base 18: mod_base = OTHER; note = 2'-O-methylguanosine-3'-phosphate
  modified_base 19: mod_base = OTHER; note = 2'-O-methylguanosine-3'-phosphate
  modified_base 20: mod_base = OTHER; note = 2'-O-methylguanosine-3'-phosphate
  modified_base 21: mod_base = OTHER; note = 2'-O-methylcytidine-3'- phosphorothioate
  modified_base 22: mod_base = OTHER; note = 2'-O-methylcytidine-3'- phosphorothioate
  modified_base 23: mod_base = OTHER; note = 2'-O-methyladenosine-3'-phosphate
atccatcccatggagctgggcca

SEQ ID NO: 5143 - RNA, 23 nt, synthetic construct
  source 1..23: mol_type = other RNA
  modified_base 1: mod_base = OTHER; note = 2'-O-methyladenosine-3'- phosphorothioate
  modified_base 2: mod_base = OTHER; note = 2'-fluoroguanosine-3'-phosphorothioate
  modified_base 3: mod_base = OTHER; note = 2'-O-methylguanosine-3'-phosphate
  modified_base 4: mod_base = OTHER; note = 2'-O-methyluridine-3'-phosphate
  modified_base 5: mod_base = OTHER; note = 2'-O-methylcytidine-3'-phosphate
  modified_base 6: mod_base = OTHER; note = 2'-fluorouridine-3'-phosphate
  modified_base 7: mod_base = OTHER; note = 2'-O-methyluridine-3'-phosphate
  modified_base 8: mod_base = OTHER; note = 2'-fluorocytidine-3'-phosphate
  modified_base 9: mod_base = OTHER; note = 2'-fluorocytidine-3'-phosphate
  modified_base 10: mod_base = OTHER; note = 2'-O-methyladenosine-3'-phosphate
  modified_base 11: mod_base = OTHER; note = 2'-O-methyluridine-3'-phosphate
  modified_base 12: mod_base = OTHER; note = 2'-O-methylcytidine-3'-phosphate
  modified_base 13: mod_base = OTHER; note = 2'-O-methylcytidine-3'-phosphate
  modified_base 14: mod_base = OTHER; note = 2'-fluorocytidine-3'-phosphate
  modified_base 15: mod_base = OTHER; note = 2'-O-methyladenosine-3'-phosphate
  modified_base 16: mod_base = OTHER; note = 2'-fluorouridine-3'-phosphate
  modified_base 17: mod_base = OTHER; note = 2'-O-methylguanosine-3'-phosphate
  modified_base 18: mod_base = OTHER; note = 2'-O-methylguanosine-3'-phosphate
  modified_base 19: mod_base = OTHER; note = 2'-O-methyladenosine-3'-phosphate
  modified_base 20: mod_base = OTHER; note = 2'-O-methylguanosine-3'-phosphate
  modified_base 21: mod_base = OTHER; note = 2'-O-methylcytidine-3'- phosphorothioate
  modified_base 22: mod_base = OTHER; note = 2'-O-methyluridine-3'-phosphorothioate
  modified_base 23: mod_base = OTHER; note = 2'-O-methylguanosine-3'-phosphate
aggtcttccatcccatggagctg

SEQ ID NO: 5144 - RNA, 23 nt, synthetic construct
  source 1..23: mol_type = other RNA
  modified_base 1: mod_base = OTHER; note = 2'-O-methyladenosine-3'- phosphorothioate
  modified_base 2: mod_base = OTHER; note = 2'-fluoroguanosine-3'-phosphorothioate
  modified_base 3: mod_base = OTHER; note = 2'-O-methylguanosine-3'-phosphate
  modified_base 4: mod_base = OTHER; note = 2'-O-methylcytidine-3'-phosphate
  modified_base 5: mod_base = OTHER; note = 2'-O-methylcytidine-3'-phosphate
  modified_base 6: mod_base = OTHER; note = 2'-fluorouridine-3'-phosphate
  modified_base 7: mod_base = OTHER; note = 2'-O-methylcytidine-3'-phosphate
  modified_base 8: mod_base = OTHER; note = 2'-fluoroadenosine-3'-phosphate
  modified_base 9: mod_base = OTHER; note = 2'-fluorouridine-3'-phosphate
  modified_base 10: mod_base = OTHER; note = 2'-O-methyladenosine-3'-phosphate
  modified_base 11: mod_base = OTHER; note = 2'-O-methylguanosine-3'-phosphate
  modified_base 12: mod_base = OTHER; note = 2'-O-methyluridine-3'-phosphate
  modified_base 13: mod_base = OTHER; note = 2'-O-methylcytidine-3'-phosphate
  modified_base 14: mod_base = OTHER; note = 2'-fluoroadenosine-3'-phosphate
  modified_base 15: mod_base = OTHER; note = 2'-O-methylguanosine-3'-phosphate
  modified_base 16: mod_base = OTHER; note = 2'-fluoroguanosine-3'-phosphate
  modified_base 17: mod_base = OTHER; note = 2'-O-methylcytidine-3'-phosphate
  modified_base 18: mod_base = OTHER; note = 2'-O-methyluridine-3'-phosphate
  modified_base 19: mod_base = OTHER; note = 2'-O-methylguanosine-3'-phosphate
  modified_base 20: mod_base = OTHER; note = 2'-O-methyladenosine-3'-phosphate
  modified_base 21: mod_base = OTHER; note = 2'-O-methylguanosine-3'- phosphorothioate
  modified_base 22: mod_base = OTHER; note = 2'-O-methyluridine-3'-phosphorothioate
  modified_base 23: mod_base = OTHER; note = 2'-O-methylguanosine-3'-phosphate
aggcctcatagtcaggctgagtg

SEQ ID NO: 5145 - RNA, 23 nt, synthetic construct
  source 1..23: mol_type = other RNA
  modified_base 1: mod_base = OTHER; note = 2'-O-methyladenosine-3'- phosphorothioate
  modified_base 2: mod_base = OTHER; note = 2'-fluorouridine -3'-phosphorothioate
  modified_base 3: mod_base = OTHER; note = 2'-O-methylguanosine-3'-phosphate
  modified_base 4: mod_base = OTHER; note = 2'-O-methyladenosine-3'-phosphate
  modified_base 5: mod_base = OTHER; note = 2'-O-methylcytidine-3'-phosphate
  modified_base 6: mod_base = OTHER; note = 2'-fluorouridine-3'-phosphate
  modified_base 7: mod_base = OTHER; note = 2'-O-methylguanosine-3'-phosphate
  modified_base 8: mod_base = OTHER; note = 2'-fluoroguanosine-3'-phosphate
  modified_base 9: mod_base = OTHER; note = 2'-fluorouridine-3'-phosphate
  modified_base 10: mod_base = OTHER; note = 2'-O-methylguanosine-3'-phosphate
  modified_base 11: mod_base = OTHER; note = 2'-O-methylguanosine-3'-phosphate
  modified_base 12: mod_base = OTHER; note = 2'-O-methylcytidine-3'-phosphate
  modified_base 13: mod_base = OTHER; note = 2'-O-methylcytidine-3'-phosphate
  modified_base 14: mod_base = OTHER; note = 2'-fluorouridine-3'-phosphate
  modified_base 15: mod_base = OTHER; note = 2'-O-methylcytidine-3'-phosphate
  modified_base 16: mod_base = OTHER; note = 2'-fluoroadenosine-3'-phosphate
  modified_base 17: mod_base = OTHER; note = 2'-O-methyluridine-3'-phosphate
  modified_base 18: mod_base = OTHER; note = 2'-O-methyladenosine-3'-phosphate
  modified_base 19: mod_base = OTHER; note = 2'-O-methylguanosine-3'-phosphate
  modified_base 20: mod_base = OTHER; note = 2'-O-methyluridine-3'-phosphate
  modified_base 21: mod_base = OTHER; note = 2'-O-methylcytidine-3'- phosphorothioate
  modified_base 22: mod_base = OTHER; note = 2'-O-methyladenosine-3'- phosphorothioate
  modified_base 23: mod_base = OTHER; note = 2'-O-methylguanosine-3'-phosphate
atgactggtggcctcatagtcag

SEQ ID NO: 5146 - RNA, 23 nt, synthetic construct
  source 1..23: mol_type = other RNA
  modified_base 1: mod_base = OTHER; note = 2'-O-methyladenosine-3'- phosphorothioate
  modified_base 2: mod_base = OTHER; note = 2'-fluorouridine -3'-phosphorothioate
  modified_base 3: mod_base = OTHER; note = 2'-O-methyladenosine-3'-phosphate
  modified_base 4: mod_base = OTHER; note = 2'-O-methyladenosine-3'-phosphate
  modified_base 5: mod_base = OTHER; note = 2'-O-methylcytidine-3'-phosphate
  modified_base 6: mod_base = OTHER; note = 2'-fluorouridine-3'-phosphate
  modified_base 7: mod_base = OTHER; note = 2'-O-methylcytidine-3'-phosphate
  modified_base 8: mod_base = OTHER; note = 2'-fluorouridine-3'-phosphate
  modified_base 9: mod_base = OTHER; note = 2'-fluoroguanosine-3'-phosphate
  modified_base 10: mod_base = OTHER; note = 2'-O-methyladenosine-3'-phosphate
  modified_base 11: mod_base = OTHER; note = 2'-O-methylcytidine-3'-phosphate
  modified_base 12: mod_base = OTHER; note = 2'-O-methyluridine-3'-phosphate
  modified_base 13: mod_base = OTHER; note = 2'-O-methylguanosine-3'-phosphate
  modified_base 14: mod_base = OTHER; note = 2'-fluoroguanosine-3'-phosphate
  modified_base 15: mod_base = OTHER; note = 2'-O-methyluridine-3'-phosphate
  modified_base 16: mod_base = OTHER; note = 2'-fluoroguanosine-3'-phosphate
  modified_base 17: mod_base = OTHER; note = 2'-O-methylguanosine-3'-phosphate
  modified_base 18: mod_base = OTHER; note = 2'-O-methylcytidine-3'-phosphate
  modified_base 19: mod_base = OTHER; note = 2'-O-methylcytidine-3'-phosphate
  modified_base 20: mod_base = OTHER; note = 2'-O-methyluridine-3'-phosphate
  modified_base 21: mod_base = OTHER; note = 2'-O-methylcytidine-3'- phosphorothioate
  modified_base 22: mod_base = OTHER; note = 2'-O-methyladenosine-3'- phosphorothioate
  modified_base 23: mod_base = OTHER; note = 2'-O-methyluridine-3'-phosphate
ataactctgactggtggcctcat

SEQ ID NO: 5147 - RNA, 23 nt, synthetic construct
  source 1..23: mol_type = other RNA
  modified_base 1: mod_base = OTHER; note = 2'-O-methyladenosine-3'- phosphorothioate
  modified_base 2: mod_base = OTHER; note = 2'-fluorocytidine-3'-phosphorothioate
  modified_base 3: mod_base = OTHER; note = 2'-O-methylguanosine-3'-phosphate
  modified_base 4: mod_base = OTHER; note = 2'-O-methylguanosine-3'-phosphate
  modified_base 5: mod_base = OTHER; note = 2'-O-methylcytidine-3'-phosphate
  modified_base 6: mod_base = OTHER; note = 2'-fluorouridine-3'-phosphate
  modified_base 7: mod_base = OTHER; note = 2'-O-methylguanosine-3'-phosphate
  modified_base 8: mod_base = OTHER; note = 2'-fluorouridine-3'-phosphate
  modified_base 9: mod_base = OTHER; note = 2'-fluoroadenosine-3'-phosphate
  modified_base 10: mod_base = OTHER; note = 2'-O-methyladenosine-3'-phosphate
  modified_base 11: mod_base = OTHER; note = 2'-O-methylcytidine-3'-phosphate
  modified_base 12: mod_base = OTHER; note = 2'-O-methyluridine-3'-phosphate
  modified_base 13: mod_base = OTHER; note = 2'-O-methylcytidine-3'-phosphate
  modified_base 14: mod_base = OTHER; note = 2'-fluorouridine-3'-phosphate
  modified_base 15: mod_base = OTHER; note = 2'-O-methylguanosine-3'-phosphate
  modified_base 16: mod_base = OTHER; note = 2'-fluoroadenosine-3'-phosphate
  modified_base 17: mod_base = OTHER; note = 2'-O-methylcytidine-3'-phosphate
  modified_base 18: mod_base = OTHER; note = 2'-O-methyluridine-3'-phosphate
  modified_base 19: mod_base = OTHER; note = 2'-O-methylguanosine-3'-phosphate
  modified_base 20: mod_base = OTHER; note = 2'-O-methylguanosine-3'-phosphate
  modified_base 21: mod_base = OTHER; note = 2'-O-methyluridine-3'-phosphorothioate
  modified_base 22: mod_base = OTHER; note = 2'-O-methylguanosine-3'- phosphorothioate
  modified_base 23: mod_base = OTHER; note = 2'-O-methylguanosine-3'-phosphate
acggctgtaactctgactggtgg

SEQ ID NO: 5148 - RNA, 23 nt, synthetic construct
  source 1..23: mol_type = other RNA
  modified_base 1: mod_base = OTHER; note = 2'-O-methyladenosine-3'- phosphorothioate
  modified_base 2: mod_base = OTHER; note = 2'-fluoroguanosine-3'-phosphorothioate
  modified_base 3: mod_base = OTHER; note = 2'-O-methylguanosine-3'-phosphate
  modified_base 4: mod_base = OTHER; note = 2'-O-methylcytidine-3'-phosphate
  modified_base 5: mod_base = OTHER; note = 2'-O-methyladenosine-3'-phosphate
  modified_base 6: mod_base = OTHER; note = 2'-fluoroguanosine-3'-phosphate
  modified_base 7: mod_base = OTHER; note = 2'-O-methylcytidine-3'-phosphate
  modified_base 8: mod_base = OTHER; note = 2'-fluoroguanosine-3'-phosphate
  modified_base 9: mod_base = OTHER; note = 2'-fluoroguanosine-3'-phosphate
  modified_base 10: mod_base = OTHER; note = 2'-O-methylcytidine-3'-phosphate
  modified_base 11: mod_base = OTHER; note = 2'-O-methyluridine-3'-phosphate
  modified_base 12: mod_base = OTHER; note = 2'-O-methylguanosine-3'-phosphate
  modified_base 13: mod_base = OTHER; note = 2'-O-methyluridine-3'-phosphate
  modified_base 14: mod_base = OTHER; note = 2'-fluoroadenosine-3'-phosphate
  modified_base 15: mod_base = OTHER; note = 2'-O-methyladenosine-3'-phosphate
  modified_base 16: mod_base = OTHER; note = 2'-fluorocytidine-3'-phosphate
  modified_base 17: mod_base = OTHER; note = 2'-O-methyluridine-3'-phosphate
  modified_base 18: mod_base = OTHER; note = 2'-O-methylcytidine-3'-phosphate
  modified_base 19: mod_base = OTHER; note = 2'-O-methyluridine-3'-phosphate
  modified_base 20: mod_base = OTHER; note = 2'-O-methylguanosine-3'-phosphate
  modified_base 21: mod_base = OTHER; note = 2'-O-methyladenosine-3'- phosphorothioate
  modified_base 22: mod_base = OTHER; note = 2'-O-methylcytidine-3'- phosphorothioate
  modified_base 23: mod_base = OTHER; note = 2'-O-methyluridine-3'-phosphate
aggcagcggctgtaactctgact

SEQ ID NO: 5149 - RNA, 23 nt, synthetic construct
  source 1..23: mol_type = other RNA
  modified_base 1: mod_base = OTHER; note = 2'-O-methyladenosine-3'- phosphorothioate
  modified_base 2: mod_base = OTHER; note = 2'-fluorouridine -3'-phosphorothioate
  modified_base 3: mod_base = OTHER; note = 2'-O-methylcytidine-3'-phosphate
  modified_base 4: mod_base = OTHER; note = 2'-O-methyladenosine-3'-phosphate
  modified_base 5: mod_base = OTHER; note = 2'-O-methylguanosine-3'-phosphate
  modified_base 6: mod_base = OTHER; note = 2'-fluorouridine-3'-phosphate
  modified_base 7: mod_base = OTHER; note = 2'-O-methyluridine-3'-phosphate
  modified_base 8: mod_base = OTHER; note = 2'-fluorocytidine-3'-phosphate
  modified_base 9: mod_base = OTHER; note = 2'-fluorocytidine-3'-phosphate
  modified_base 10: mod_base = OTHER; note = 2'-O-methyladenosine-3'-phosphate
  modified_base 11: mod_base = OTHER; note = 2'-O-methylguanosine-3'-phosphate
  modified_base 12: mod_base = OTHER; note = 2'-O-methylguanosine-3'-phosphate
  modified_base 13: mod_base = OTHER; note = 2'-O-methylcytidine-3'-phosphate
  modified_base 14: mod_base = OTHER; note = 2'-fluoroadenosine-3'-phosphate
  modified_base 15: mod_base = OTHER; note = 2'-O-methylguanosine-3'-phosphate
  modified_base 16: mod_base = OTHER; note = 2'-fluorocytidine-3'-phosphate
  modified_base 17: mod_base = OTHER; note = 2'-O-methylguanosine-3'-phosphate
  modified_base 18: mod_base = OTHER; note = 2'-O-methylguanosine-3'-phosphate
  modified_base 19: mod_base = OTHER; note = 2'-O-methylcytidine-3'-phosphate
  modified_base 20: mod_base = OTHER; note = 2'-O-methyluridine-3'-phosphate
  modified_base 21: mod_base = OTHER; note = 2'-O-methylguanosine-3'- phosphorothioate
  modified_base 22: mod_base = OTHER; note = 2'-O-methyluridine-3'-phosphorothioate
  modified_base 23: mod_base = OTHER; note = 2'-O-methyladenosine-3'-phosphate
atcagttccaggcagcggctgta

SEQ ID NO: 5150 - RNA, 23 nt, synthetic construct
  source 1..23: mol_type = other RNA
  modified_base 1: mod_base = OTHER; note = 2'-O-methyladenosine-3'- phosphorothioate
  modified_base 2: mod_base = OTHER; note = 2'-fluorocytidine-3'-phosphorothioate
  modified_base 3: mod_base = OTHER; note = 2'-O-methyladenosine-3'-phosphate
  modified_base 4: mod_base = OTHER; note = 2'-O-methylguanosine-3'-phosphate
  modified_base 5: mod_base = OTHER; note = 2'-O-methylcytidine-3'-phosphate
  modified_base 6: mod_base = OTHER; note = 2'-fluoroadenosine-3'-phosphate
  modified_base 7: mod_base = OTHER; note = 2'-O-methyluridine-3'-phosphate
  modified_base 8: mod_base = OTHER; note = 2'-fluorocytidine-3'-phosphate
  modified_base 9: mod_base = OTHER; note = 2'-fluoroadenosine-3'-phosphate
  modified_base 10: mod_base = OTHER; note = 2'-O-methylguanosine-3'-phosphate
  modified_base 11: mod_base = OTHER; note = 2'-O-methyluridine-3'-phosphate
  modified_base 12: mod_base = OTHER; note = 2'-O-methyluridine-3'-phosphate
  modified_base 13: mod_base = OTHER; note = 2'-O-methylcytidine-3'-phosphate
  modified_base 14: mod_base = OTHER; note = 2'-fluorocytidine-3'-phosphate
  modified_base 15: mod_base = OTHER; note = 2'-O-methyladenosine-3'-phosphate
  modified_base 16: mod_base = OTHER; note = 2'-fluoroguanosine-3'-phosphate
  modified_base 17: mod_base = OTHER; note = 2'-O-methylguanosine-3'-phosphate
  modified_base 18: mod_base = OTHER; note = 2'-O-methylcytidine-3'-phosphate
  modified_base 19: mod_base = OTHER; note = 2'-O-methyladenosine-3'-phosphate
  modified_base 20: mod_base = OTHER; note = 2'-O-methylguanosine-3'-phosphate
  modified_base 21: mod_base = OTHER; note = 2'-O-methylcytidine-3'- phosphorothioate
  modified_base 22: mod_base = OTHER; note = 2'-O-methylguanosine-3'- phosphorothioate
  modified_base 23: mod_base = OTHER; note = 2'-O-methylguanosine-3'-phosphate
acagcatcagttccaggcagcgg

SEQ ID NO: 5151 - RNA, 23 nt, synthetic construct
  source 1..23: mol_type = other RNA
  modified_base 1: mod_base = OTHER; note = 2'-O-methyladenosine-3'- phosphorothioate
  modified_base 2: mod_base = OTHER; note = 2'-fluorocytidine-3'-phosphorothioate
  modified_base 3: mod_base = OTHER; note = 2'-O-methylguanosine-3'-phosphate
  modified_base 4: mod_base = OTHER; note = 2'-O-methyluridine-3'-phosphate
  modified_base 5: mod_base = OTHER; note = 2'-O-methylguanosine-3'-phosphate
  modified_base 6: mod_base = OTHER; note = 2'-fluorocytidine-3'-phosphate
  modified_base 7: mod_base = OTHER; note = 2'-O-methylguanosine-3'-phosphate
  modified_base 8: mod_base = OTHER; note = 2'-fluorouridine-3'-phosphate
  modified_base 9: mod_base = OTHER; note = 2'-fluorocytidine-3'-phosphate
  modified_base 10: mod_base = OTHER; note = 2'-O-methyladenosine-3'-phosphate
  modified_base 11: mod_base = OTHER; note = 2'-O-methylguanosine-3'-phosphate
  modified_base 12: mod_base = OTHER; note = 2'-O-methylcytidine-3'-phosphate
  modified_base 13: mod_base = OTHER; note = 2'-O-methyladenosine-3'-phosphate
  modified_base 14: mod_base = OTHER; note = 2'-fluorouridine-3'-phosphate
  modified_base 15: mod_base = OTHER; note = 2'-O-methylcytidine-3'-phosphate
  modified_base 16: mod_base = OTHER; note = 2'-fluoroadenosine-3'-phosphate
  modified_base 17: mod_base = OTHER; note = 2'-O-methylguanosine-3'-phosphate
  modified_base 18: mod_base = OTHER; note = 2'-O-methyluridine-3'-phosphate
  modified_base 19: mod_base = OTHER; note = 2'-O-methyluridine-3'-phosphate
  modified_base 20: mod_base = OTHER; note = 2'-O-methylcytidine-3'-phosphate
  modified_base 21: mod_base = OTHER; note = 2'-O-methylcytidine-3'- phosphorothioate
  modified_base 22: mod_base = OTHER; note = 2'-O-methyladenosine-3'- phosphorothioate
  modified_base 23: mod_base = OTHER; note = 2'-O-methylguanosine-3'-phosphate
acgtgcgtcagcatcagttccag

SEQ ID NO: 5152 - RNA, 23 nt, synthetic construct
  source 1..23: mol_type = other RNA
  modified_base 1: mod_base = OTHER; note = 2'-O-methyladenosine-3'- phosphorothioate
  modified_base 2: mod_base = OTHER; note = 2'-fluoroguanosine-3'-phosphorothioate
  modified_base 3: mod_base = OTHER; note = 2'-O-methylguanosine-3'-phosphate
  modified_base 4: mod_base = OTHER; note = 2'-O-methylcytidine-3'-phosphate
  modified_base 5: mod_base = OTHER; note = 2'-O-methylcytidine-3'-phosphate
  modified_base 6: mod_base = OTHER; note = 2'-fluoroadenosine-3'-phosphate
  modified_base 7: mod_base = OTHER; note = 2'-O-methylcytidine-3'-phosphate
  modified_base 8: mod_base = OTHER; note = 2'-fluoroguanosine-3'-phosphate
  modified_base 9: mod_base = OTHER; note = 2'-fluorouridine-3'-phosphate
  modified_base 10: mod_base = OTHER; note = 2'-O-methylguanosine-3'-phosphate
  modified_base 11: mod_base = OTHER; note = 2'-O-methylcytidine-3'-phosphate
  modified_base 12: mod_base = OTHER; note = 2'-O-methylguanosine-3'-phosphate
  modified_base 13: mod_base = OTHER; note = 2'-O-methyluridine-3'-phosphate
  modified_base 14: mod_base = OTHER; note = 2'-fluorocytidine-3'-phosphate
  modified_base 15: mod_base = OTHER; note = 2'-O-methyladenosine-3'-phosphate
  modified_base 16: mod_base = OTHER; note = 2'-fluoroguanosine-3'-phosphate
  modified_base 17: mod_base = OTHER; note = 2'-O-methylcytidine-3'-phosphate
  modified_base 18: mod_base = OTHER; note = 2'-O-methyladenosine-3'-phosphate
  modified_base 19: mod_base = OTHER; note = 2'-O-methyluridine-3'-phosphate
  modified_base 20: mod_base = OTHER; note = 2'-O-methylcytidine-3'-phosphate
  modified_base 21: mod_base = OTHER; note = 2'-O-methyladenosine-3'- phosphorothioate
  modified_base 22: mod_base = OTHER; note = 2'-O-methylguanosine-3'- phosphorothioate
  modified_base 23: mod_base = OTHER; note = 2'-O-methyluridine-3'-phosphate
aggccacgtgcgtcagcatcagt

SEQ ID NO: 5153 - RNA, 23 nt, synthetic construct
  source 1..23: mol_type = other RNA
  modified_base 1: mod_base = OTHER; note = 2'-O-methyladenosine-3'- phosphorothioate
  modified_base 2: mod_base = OTHER; note = 2'-fluorocytidine-3'-phosphorothioate
  modified_base 3: mod_base = OTHER; note = 2'-O-methylcytidine-3'-phosphate
  modified_base 4: mod_base = OTHER; note = 2'-O-methyladenosine-3'-phosphate
  modified_base 5: mod_base = OTHER; note = 2'-O-methylcytidine-3'-phosphate
  modified_base 6: mod_base = OTHER; note = 2'-fluorocytidine-3'-phosphate
  modified_base 7: mod_base = OTHER; note = 2'-O-methyladenosine-3'-phosphate
  modified_base 8: mod_base = OTHER; note = 2'-fluorouridine-3'-phosphate
  modified_base 9: mod_base = OTHER; note = 2'-fluoroguanosine-3'-phosphate
  modified_base 10: mod_base = OTHER; note = 2'-O-methyladenosine-3'-phosphate
  modified_base 11: mod_base = OTHER; note = 2'-O-methylguanosine-3'-phosphate
  modified_base 12: mod_base = OTHER; note = 2'-O-methylguanosine-3'-phosphate
  modified_base 13: mod_base = OTHER; note = 2'-O-methyluridine-3'-phosphate
  modified_base 14: mod_base = OTHER; note = 2'-fluoroguanosine-3'-phosphate
  modified_base 15: mod_base = OTHER; note = 2'-O-methylguanosine-3'-phosphate
  modified_base 16: mod_base = OTHER; note = 2'-fluorocytidine-3'-phosphate
  modified_base 17: mod_base = OTHER; note = 2'-O-methyladenosine-3'-phosphate
  modified_base 18: mod_base = OTHER; note = 2'-O-methylcytidine-3'-phosphate
  modified_base 19: mod_base = OTHER; note = 2'-O-methyladenosine-3'-phosphate
  modified_base 20: mod_base = OTHER; note = 2'-O-methyluridine-3'-phosphate
  modified_base 21: mod_base = OTHER; note = 2'-O-methylguanosine-3'- phosphorothioate
  modified_base 22: mod_base = OTHER; note = 2'-O-methylguanosine-3'- phosphorothioate
  modified_base 23: mod_base = OTHER; note = 2'-O-methylguanosine-3'-phosphate
accaccatgaggtggcacatggg

SEQ ID NO: 5154 - RNA, 23 nt, synthetic construct
  source 1..23: mol_type = other RNA
  modified_base 1: mod_base = OTHER; note = 2'-O-methyladenosine-3'- phosphorothioate
  modified_base 2: mod_base = OTHER; note = 2'-fluorouridine -3'-phosphorothioate
  modified_base 3: mod_base = OTHER; note = 2'-O-methyluridine-3'-phosphate
  modified_base 4: mod_base = OTHER; note = 2'-O-methylguanosine-3'-phosphate
  modified_base 5: mod_base = OTHER; note = 2'-O-methyluridine-3'-phosphate
  modified_base 6: mod_base = OTHER; note = 2'-fluoroguanosine-3'-phosphate
  modified_base 7: mod_base = OTHER; note = 2'-O-methylguanosine-3'-phosphate
  modified_base 8: mod_base = OTHER; note = 2'-fluoroguanosine-3'-phosphate
  modified_base 9: mod_base = OTHER; note = 2'-fluoroadenosine-3'-phosphate
  modified_base 10: mod_base = OTHER; note = 2'-O-methyladenosine-3'-phosphate
  modified_base 11: mod_base = OTHER; note = 2'-O-methylguanosine-3'-phosphate
  modified_base 12: mod_base = OTHER; note = 2'-O-methylcytidine-3'-phosphate
  modified_base 13: mod_base = OTHER; note = 2'-O-methylcytidine-3'-phosphate
  modified_base 14: mod_base = OTHER; note = 2'-fluoroadenosine-3'-phosphate
  modified_base 15: mod_base = OTHER; note = 2'-O-methylcytidine-3'-phosphate
  modified_base 16: mod_base = OTHER; note = 2'-fluorocytidine-3'-phosphate
  modified_base 17: mod_base = OTHER; note = 2'-O-methyladenosine-3'-phosphate
  modified_base 18: mod_base = OTHER; note = 2'-O-methyluridine-3'-phosphate
  modified_base 19: mod_base = OTHER; note = 2'-O-methylguanosine-3'-phosphate
  modified_base 20: mod_base = OTHER; note = 2'-O-methyladenosine-3'-phosphate
  modified_base 21: mod_base = OTHER; note = 2'-O-methylguanosine-3'- phosphorothioate
  modified_base 22: mod_base = OTHER; note = 2'-O-methylguanosine-3'- phosphorothioate
  modified_base 23: mod_base = OTHER; note = 2'-O-methyluridine-3'-phosphate
attgtgggaagccaccatgaggt

SEQ ID NO: 5155 - RNA, 23 nt, synthetic construct
  source 1..23: mol_type = other RNA
  modified_base 1: mod_base = OTHER; note = 2'-O-methyladenosine-3'- phosphorothioate
  modified_base 2: mod_base = OTHER; note = 2'-fluoroadenosine-3'-phosphorothioate
  modified_base 3: mod_base = OTHER; note = 2'-O-methyluridine-3'-phosphate
  modified_base 4: mod_base = OTHER; note = 2'-O-methyluridine-3'-phosphate
  modified_base 5: mod_base = OTHER; note = 2'-O-methylcytidine-3'-phosphate
  modified_base 6: mod_base = OTHER; note = 2'-fluorocytidine-3'-phosphate
  modified_base 7: mod_base = OTHER; note = 2'-O-methyluridine-3'-phosphate
  modified_base 8: mod_base = OTHER; note = 2'-fluorocytidine-3'-phosphate
  modified_base 9: mod_base = OTHER; note = 2'-fluoroadenosine-3'-phosphate
  modified_base 10: mod_base = OTHER; note = 2'-O-methyluridine-3'-phosphate
  modified_base 11: mod_base = OTHER; note = 2'-O-methyluridine-3'-phosphate
  modified_base 12: mod_base = OTHER; note = 2'-O-methylguanosine-3'-phosphate
  modified_base 13: mod_base = OTHER; note = 2'-O-methyluridine-3'-phosphate
  modified_base 14: mod_base = OTHER; note = 2'-fluoroguanosine-3'-phosphate
  modified_base 15: mod_base = OTHER; note = 2'-O-methylguanosine-3'-phosphate
  modified_base 16: mod_base = OTHER; note = 2'-fluoroguanosine-3'-phosphate
  modified_base 17: mod_base = OTHER; note = 2'-O-methyladenosine-3'-phosphate
  modified_base 18: mod_base = OTHER; note = 2'-O-methyladenosine-3'-phosphate
  modified_base 19: mod_base = OTHER; note = 2'-O-methylguanosine-3'-phosphate
  modified_base 20: mod_base = OTHER; note = 2'-O-methylcytidine-3'-phosphate
  modified_base 21: mod_base = OTHER; note = 2'-O-methylcytidine-3'- phosphorothioate
  modified_base 22: mod_base = OTHER; note = 2'-O-methyladenosine-3'- phosphorothioate
  modified_base 23: mod_base = OTHER; note = 2'-O-methylcytidine-3'-phosphate
aattcctcattgtgggaagccac

SEQ ID NO: 5156 - RNA, 23 nt, synthetic construct
  source 1..23: mol_type = other RNA
  modified_base 1: mod_base = OTHER; note = 2'-O-methyladenosine-3'- phosphorothioate
  modified_base 2: mod_base = OTHER; note = 2'-fluoroadenosine-3'-phosphorothioate
  modified_base 3: mod_base = OTHER; note = 2'-O-methyladenosine-3'-phosphate
  modified_base 4: mod_base = OTHER; note = 2'-O-methylcytidine-3'-phosphate
  modified_base 5: mod_base = OTHER; note = 2'-O-methyladenosine-3'-phosphate
  modified_base 6: mod_base = OTHER; note = 2'-fluoroguanosine-3'-phosphate
  modified_base 7: mod_base = OTHER; note = 2'-O-methyladenosine-3'-phosphate
  modified_base 8: mod_base = OTHER; note = 2'-fluorouridine-3'-phosphate
  modified_base 9: mod_base = OTHER; note = 2'-fluorouridine-3'-phosphate
  modified_base 10: mod_base = OTHER; note = 2'-O-methylcytidine-3'-phosphate
  modified_base 11: mod_base = OTHER; note = 2'-O-methylcytidine-3'-phosphate
  modified_base 12: mod_base = OTHER; note = 2'-O-methyluridine-3'-phosphate
  modified_base 13: mod_base = OTHER; note = 2'-O-methylcytidine-3'-phosphate
  modified_base 14: mod_base = OTHER; note = 2'-fluoroadenosine-3'-phosphate
  modified_base 15: mod_base = OTHER; note = 2'-O-methyluridine-3'-phosphate
  modified_base 16: mod_base = OTHER; note = 2'-fluorouridine-3'-phosphate
  modified_base 17: mod_base = OTHER; note = 2'-O-methylguanosine-3'-phosphate
  modified_base 18: mod_base = OTHER; note = 2'-O-methyluridine-3'-phosphate
  modified_base 19: mod_base = OTHER; note = 2'-O-methylguanosine-3'-phosphate
  modified_base 20: mod_base = OTHER; note = 2'-O-methylguanosine-3'-phosphate
  modified_base 21: mod_base = OTHER; note = 2'-O-methylguanosine-3'- phosphorothioate
  modified_base 22: mod_base = OTHER; note = 2'-O-methyladenosine-3'- phosphorothioate
  modified_base 23: mod_base = OTHER; note = 2'-O-methyladenosine-3'-phosphate
aaacagattcctcattgtgggaa

SEQ ID NO: 5157 - RNA, 23 nt, synthetic construct
  source 1..23: mol_type = other RNA
  modified_base 1: mod_base = OTHER; note = 2'-O-methyladenosine-3'- phosphorothioate
  modified_base 2: mod_base = OTHER; note = 2'-fluorouridine -3'-phosphorothioate
  modified_base 3: mod_base = OTHER; note = 2'-O-methylguanosine-3'-phosphate
  modified_base 4: mod_base = OTHER; note = 2'-O-methylguanosine-3'-phosphate
  modified_base 5: mod_base = OTHER; note = 2'-O-methylcytidine-3'-phosphate
  modified_base 6: mod_base = OTHER; note = 2'-fluoroguanosine-3'-phosphate
  modified_base 7: mod_base = OTHER; note = 2'-O-methyladenosine-3'-phosphate
  modified_base 8: mod_base = OTHER; note = 2'-fluoroadenosine-3'-phosphate
  modified_base 9: mod_base = OTHER; note = 2'-fluorocytidine-3'-phosphate
  modified_base 10: mod_base = OTHER; note = 2'-O-methyladenosine-3'-phosphate
  modified_base 11: mod_base = OTHER; note = 2'-O-methylguanosine-3'-phosphate
  modified_base 12: mod_base = OTHER; note = 2'-O-methyladenosine-3'-phosphate
  modified_base 13: mod_base = OTHER; note = 2'-O-methyluridine-3'-phosphate
  modified_base 14: mod_base = OTHER; note = 2'-fluorouridine-3'-phosphate
  modified_base 15: mod_base = OTHER; note = 2'-O-methylcytidine-3'-phosphate
  modified_base 16: mod_base = OTHER; note = 2'-fluorocytidine-3'-phosphate
  modified_base 17: mod_base = OTHER; note = 2'-O-methyluridine-3'-phosphate
  modified_base 18: mod_base = OTHER; note = 2'-O-methylcytidine-3'-phosphate
  modified_base 19: mod_base = OTHER; note = 2'-O-methyladenosine-3'-phosphate
  modified_base 20: mod_base = OTHER; note = 2'-O-methyluridine-3'-phosphate
  modified_base 21: mod_base = OTHER; note = 2'-O-methyluridine-3'-phosphorothioate
  modified_base 22: mod_base = OTHER; note = 2'-O-methylguanosine-3'- phosphorothioate
  modified_base 23: mod_base = OTHER; note = 2'-O-methyluridine-3'-phosphate
atggcgaacagattcctcattgt

SEQ ID NO: 5158 - RNA, 23 nt, synthetic construct
  source 1..23: mol_type = other RNA
  modified_base 1: mod_base = OTHER; note = 2'-O-methyladenosine-3'- phosphorothioate
  modified_base 2: mod_base = OTHER; note = 2'-fluorouridine -3'-phosphorothioate
  modified_base 3: mod_base = OTHER; note = 2'-O-methyluridine-3'-phosphate
  modified_base 4: mod_base = OTHER; note = 2'-O-methylguanosine-3'-phosphate
  modified_base 5: mod_base = OTHER; note = 2'-O-methylguanosine-3'-phosphate
  modified_base 6: mod_base = OTHER; note = 2'-fluorouridine-3'-phosphate
  modified_base 7: mod_base = OTHER; note = 2'-O-methyluridine-3'-phosphate
  modified_base 8: mod_base = OTHER; note = 2'-fluoroguanosine-3'-phosphate
  modified_base 9: mod_base = OTHER; note = 2'-fluorocytidine-3'-phosphate
  modified_base 10: mod_base = OTHER; note = 2'-O-methylcytidine-3'-phosphate
  modified_base 11: mod_base = OTHER; note = 2'-O-methyluridine-3'-phosphate
  modified_base 12: mod_base = OTHER; note = 2'-O-methylguanosine-3'-phosphate
  modified_base 13: mod_base = OTHER; note = 2'-O-methylguanosine-3'-phosphate
  modified_base 14: mod_base = OTHER; note = 2'-fluorocytidine-3'-phosphate
  modified_base 15: mod_base = OTHER; note = 2'-O-methylguanosine-3'-phosphate
  modified_base 16: mod_base = OTHER; note = 2'-fluoroadenosine-3'-phosphate
  modified_base 17: mod_base = OTHER; note = 2'-O-methyladenosine-3'-phosphate
  modified_base 18: mod_base = OTHER; note = 2'-O-methylcytidine-3'-phosphate
  modified_base 19: mod_base = OTHER; note = 2'-O-methyladenosine-3'-phosphate
  modified_base 20: mod_base = OTHER; note = 2'-O-methylguanosine-3'-phosphate
  modified_base 21: mod_base = OTHER; note = 2'-O-methyladenosine-3'- phosphorothioate
  modified_base 22: mod_base = OTHER; note = 2'-O-methyluridine-3'-phosphorothioate
  modified_base 23: mod_base = OTHER; note = 2'-O-methyluridine-3'-phosphate
attggttgcctggcgaacagatt

SEQ ID NO: 5159 - RNA, 23 nt, synthetic construct
  source 1..23: mol_type = other RNA
  modified_base 1: mod_base = OTHER; note = 2'-O-methyladenosine-3'- phosphorothioate
  modified_base 2: mod_base = OTHER; note = 2'-fluorouridine -3'-phosphorothioate
  modified_base 3: mod_base = OTHER; note = 2'-O-methylguanosine-3'-phosphate
  modified_base 4: mod_base = OTHER; note = 2'-O-methylcytidine-3'-phosphate
  modified_base 5: mod_base = OTHER; note = 2'-O-methylguanosine-3'-phosphate
  modified_base 6: mod_base = OTHER; note = 2'-fluorocytidine-3'-phosphate
  modified_base 7: mod_base = OTHER; note = 2'-O-methyluridine-3'-phosphate
  modified_base 8: mod_base = OTHER; note = 2'-fluorouridine-3'-phosphate
  modified_base 9: mod_base = OTHER; note = 2'-fluoroguanosine-3'-phosphate
  modified_base 10: mod_base = OTHER; note = 2'-O-methylguanosine-3'-phosphate
  modified_base 11: mod_base = OTHER; note = 2'-O-methyluridine-3'-phosphate
  modified_base 12: mod_base = OTHER; note = 2'-O-methyluridine-3'-phosphate
  modified_base 13: mod_base = OTHER; note = 2'-O-methylguanosine-3'-phosphate
  modified_base 14: mod_base = OTHER; note = 2'-fluorocytidine-3'-phosphate
  modified_base 15: mod_base = OTHER; note = 2'-O-methylcytidine-3'-phosphate
  modified_base 16: mod_base = OTHER; note = 2'-fluorouridine-3'-phosphate
  modified_base 17: mod_base = OTHER; note = 2'-O-methylguanosine-3'-phosphate
  modified_base 18: mod_base = OTHER; note = 2'-O-methylguanosine-3'-phosphate
  modified_base 19: mod_base = OTHER; note = 2'-O-methylcytidine-3'-phosphate
  modified_base 20: mod_base = OTHER; note = 2'-O-methylguanosine-3'-phosphate
  modified_base 21: mod_base = OTHER; note = 2'-O-methyladenosine-3'- phosphorothioate
  modified_base 22: mod_base = OTHER; note = 2'-O-methyladenosine-3'- phosphorothioate
  modified_base 23: mod_base = OTHER; note = 2'-O-methylcytidine-3'-phosphate
atgcgcttggttgcctggcgaac

SEQ ID NO: 5160 - RNA, 23 nt, synthetic construct
  source 1..23: mol_type = other RNA
  modified_base 1: mod_base = OTHER; note = 2'-O-methyladenosine-3'- phosphorothioate
  modified_base 2: mod_base = OTHER; note = 2'-fluorouridine -3'-phosphorothioate
  modified_base 3: mod_base = OTHER; note = 2'-O-methylcytidine-3'-phosphate
  modified_base 4: mod_base = OTHER; note = 2'-O-methylcytidine-3'-phosphate
  modified_base 5: mod_base = OTHER; note = 2'-O-methylcytidine-3'-phosphate
  modified_base 6: mod_base = OTHER; note = 2'-fluoroadenosine-3'-phosphate
  modified_base 7: mod_base = OTHER; note = 2'-O-methylcytidine-3'-phosphate
  modified_base 8: mod_base = OTHER; note = 2'-fluoroadenosine-3'-phosphate
  modified_base 9: mod_base = OTHER; note = 2'-fluorouridine-3'-phosphate
  modified_base 10: mod_base = OTHER; note = 2'-O-methylguanosine-3'-phosphate
  modified_base 11: mod_base = OTHER; note = 2'-O-methylcytidine-3'-phosphate
  modified_base 12: mod_base = OTHER; note = 2'-O-methylguanosine-3'-phosphate
  modified_base 13: mod_base = OTHER; note = 2'-O-methylcytidine-3'-phosphate
  modified_base 14: mod_base = OTHER; note = 2'-fluorouridine-3'-phosphate
  modified_base 15: mod_base = OTHER; note = 2'-O-methyluridine-3'-phosphate
  modified_base 16: mod_base = OTHER; note = 2'-fluoroguanosine-3'-phosphate
  modified_base 17: mod_base = OTHER; note = 2'-O-methylguanosine-3'-phosphate
  modified_base 18: mod_base = OTHER; note = 2'-O-methyluridine-3'-phosphate
  modified_base 19: mod_base = OTHER; note = 2'-O-methyluridine-3'-phosphate
  modified_base 20: mod_base = OTHER; note = 2'-O-methylguanosine-3'-phosphate
  modified_base 21: mod_base = OTHER; note = 2'-O-methylcytidine-3'- phosphorothioate
  modified_base 22: mod_base = OTHER; note = 2'-O-methylcytidine-3'- phosphorothioate
  modified_base 23: mod_base = OTHER; note = 2'-O-methyluridine-3'-phosphate
atcccacatgcgcttggttgcct

SEQ ID NO: 5161 - RNA, 23 nt, synthetic construct
  source 1..23: mol_type = other RNA
  modified_base 1: mod_base = OTHER; note = 2'-O-methyladenosine-3'- phosphorothioate
  modified_base 2: mod_base = OTHER; note = 2'-fluorocytidine-3'-phosphorothioate
  modified_base 3: mod_base = OTHER; note = 2'-O-methylcytidine-3'-phosphate
  modified_base 4: mod_base = OTHER; note = 2'-O-methyladenosine-3'-phosphate
  modified_base 5: mod_base = OTHER; note = 2'-O-methylguanosine-3'-phosphate
  modified_base 6: mod_base = OTHER; note = 2'-fluorocytidine-3'-phosphate
  modified_base 7: mod_base = OTHER; note = 2'-O-methyluridine-3'-phosphate
  modified_base 8: mod_base = OTHER; note = 2'-fluorocytidine-3'-phosphate
  modified_base 9: mod_base = OTHER; note = 2'-fluorocytidine-3'-phosphate
  modified_base 10: mod_base = OTHER; note = 2'-O-methylcytidine-3'-phosphate
  modified_base 11: mod_base = OTHER; note = 2'-O-methyladenosine-3'-phosphate
  modified_base 12: mod_base = OTHER; note = 2'-O-methylcytidine-3'-phosphate
  modified_base 13: mod_base = OTHER; note = 2'-O-methyladenosine-3'-phosphate
  modified_base 14: mod_base = OTHER; note = 2'-fluorouridine-3'-phosphate
  modified_base 15: mod_base = OTHER; note = 2'-O-methylguanosine-3'-phosphate
  modified_base 16: mod_base = OTHER; note = 2'-fluorocytidine-3'-phosphate
  modified_base 17: mod_base = OTHER; note = 2'-O-methylguanosine-3'-phosphate
  modified_base 18: mod_base = OTHER; note = 2'-O-methylcytidine-3'-phosphate
  modified_base 19: mod_base = OTHER; note = 2'-O-methyluridine-3'-phosphate
  modified_base 20: mod_base = OTHER; note = 2'-O-methyluridine-3'-phosphate
  modified_base 21: mod_base = OTHER; note = 2'-O-methylguanosine-3'- phosphorothioate
  modified_base 22: mod_base = OTHER; note = 2'-O-methylguanosine-3'- phosphorothioate
  modified_base 23: mod_base = OTHER; note = 2'-O-methyluridine-3'-phosphate
accagctcccacatgcgcttggt

SEQ ID NO: 5162 - RNA, 23 nt, synthetic construct
  source 1..23: mol_type = other RNA
  modified_base 1: mod_base = OTHER; note = 2'-O-methyladenosine-3'- phosphorothioate
  modified_base 2: mod_base = OTHER; note = 2'-fluoroadenosine-3'-phosphorothioate
  modified_base 3: mod_base = OTHER; note = 2'-O-methyladenosine-3'-phosphate
  modified_base 4: mod_base = OTHER; note = 2'-O-methyluridine-3'-phosphate
  modified_base 5: mod_base = OTHER; note = 2'-O-methylguanosine-3'-phosphate
  modified_base 6: mod_base = OTHER; note = 2'-fluorocytidine-3'-phosphate
  modified_base 7: mod_base = OTHER; note = 2'-O-methylcytidine-3'-phosphate
  modified_base 8: mod_base = OTHER; note = 2'-fluorocytidine-3'-phosphate
  modified_base 9: mod_base = OTHER; note = 2'-fluoroadenosine-3'-phosphate
  modified_base 10: mod_base = OTHER; note = 2'-O-methylguanosine-3'-phosphate
  modified_base 11: mod_base = OTHER; note = 2'-O-methylcytidine-3'-phosphate
  modified_base 12: mod_base = OTHER; note = 2'-O-methyluridine-3'-phosphate
  modified_base 13: mod_base = OTHER; note = 2'-O-methylcytidine-3'-phosphate
  modified_base 14: mod_base = OTHER; note = 2'-fluorocytidine-3'-phosphate
  modified_base 15: mod_base = OTHER; note = 2'-O-methylcytidine-3'-phosphate
  modified_base 16: mod_base = OTHER; note = 2'-fluoroadenosine-3'-phosphate
  modified_base 17: mod_base = OTHER; note = 2'-O-methylcytidine-3'-phosphate
  modified_base 18: mod_base = OTHER; note = 2'-O-methyladenosine-3'-phosphate
  modified_base 19: mod_base = OTHER; note = 2'-O-methyluridine-3'-phosphate
  modified_base 20: mod_base = OTHER; note = 2'-O-methylguanosine-3'-phosphate
  modified_base 21: mod_base = OTHER; note = 2'-O-methylcytidine-3'- phosphorothioate
  modified_base 22: mod_base = OTHER; note = 2'-O-methylguanosine-3'- phosphorothioate
  modified_base 23: mod_base = OTHER; note = 2'-O-methylcytidine-3'-phosphate
aaatgcccagctcccacatgcgc

SEQ ID NO: 5163 - RNA, 23 nt, synthetic construct
  source 1..23: mol_type = other RNA
  modified_base 1: mod_base = OTHER; note = 2'-O-methyladenosine-3'- phosphorothioate
  modified_base 2: mod_base = OTHER; note = 2'-fluoroadenosine-3'-phosphorothioate
  modified_base 3: mod_base = OTHER; note = 2'-O-methylguanosine-3'-phosphate
  modified_base 4: mod_base = OTHER; note = 2'-O-methyladenosine-3'-phosphate
  modified_base 5: mod_base = OTHER; note = 2'-O-methylguanosine-3'-phosphate
  modified_base 6: mod_base = OTHER; note = 2'-fluoroguanosine-3'-phosphate
  modified_base 7: mod_base = OTHER; note = 2'-O-methyladenosine-3'-phosphate
  modified_base 8: mod_base = OTHER; note = 2'-fluoroadenosine-3'-phosphate
  modified_base 9: mod_base = OTHER; note = 2'-fluorouridine-3'-phosphate
  modified_base 10: mod_base = OTHER; note = 2'-O-methylguanosine-3'-phosphate
  modified_base 11: mod_base = OTHER; note = 2'-O-methylcytidine-3'-phosphate
  modified_base 12: mod_base = OTHER; note = 2'-O-methylcytidine-3'-phosphate
  modified_base 13: mod_base = OTHER; note = 2'-O-methylcytidine-3'-phosphate
  modified_base 14: mod_base = OTHER; note = 2'-fluoroadenosine-3'-phosphate
  modified_base 15: mod_base = OTHER; note = 2'-O-methylguanosine-3'-phosphate
  modified_base 16: mod_base = OTHER; note = 2'-fluorocytidine-3'-phosphate
  modified_base 17: mod_base = OTHER; note = 2'-O-methyluridine-3'-phosphate
  modified_base 18: mod_base = OTHER; note = 2'-O-methylcytidine-3'-phosphate
  modified_base 19: mod_base = OTHER; note = 2'-O-methylcytidine-3'-phosphate
  modified_base 20: mod_base = OTHER; note = 2'-O-methylcytidine-3'-phosphate
  modified_base 21: mod_base = OTHER; note = 2'-O-methyladenosine-3'- phosphorothioate
  modified_base 22: mod_base = OTHER; note = 2'-O-methylcytidine-3'- phosphorothioate
  modified_base 23: mod_base = OTHER; note = 2'-O-methyladenosine-3'-phosphate
aagaggaatgcccagctcccaca

SEQ ID NO: 5164 - RNA, 23 nt, synthetic construct
  source 1..23: mol_type = other RNA
  modified_base 1: mod_base = OTHER; note = 2'-O-methyladenosine-3'- phosphorothioate
  modified_base 2: mod_base = OTHER; note = 2'-fluorouridine -3'-phosphorothioate
  modified_base 3: mod_base = OTHER; note = 2'-O-methylcytidine-3'-phosphate
  modified_base 4: mod_base = OTHER; note = 2'-O-methylcytidine-3'-phosphate
  modified_base 5: mod_base = OTHER; note = 2'-O-methylcytidine-3'-phosphate
  modified_base 6: mod_base = OTHER; note = 2'-fluoroadenosine-3'-phosphate
  modified_base 7: mod_base = OTHER; note = 2'-O-methyluridine-3'-phosphate
  modified_base 8: mod_base = OTHER; note = 2'-fluorocytidine-3'-phosphate
  modified_base 9: mod_base = OTHER; note = 2'-fluorocytidine-3'-phosphate
  modified_base 10: mod_base = OTHER; note = 2'-O-methyladenosine-3'-phosphate
  modified_base 11: mod_base = OTHER; note = 2'-O-methylguanosine-3'-phosphate
  modified_base 12: mod_base = OTHER; note = 2'-O-methyladenosine-3'-phosphate
  modified_base 13: mod_base = OTHER; note = 2'-O-methylguanosine-3'-phosphate
  modified_base 14: mod_base = OTHER; note = 2'-fluoroguanosine-3'-phosphate
  modified_base 15: mod_base = OTHER; note = 2'-O-methyladenosine-3'-phosphate
  modified_base 16: mod_base = OTHER; note = 2'-fluoroadenosine-3'-phosphate
  modified_base 17: mod_base = OTHER; note = 2'-O-methyluridine-3'-phosphate
  modified_base 18: mod_base = OTHER; note = 2'-O-methylguanosine-3'-phosphate
  modified_base 19: mod_base = OTHER; note = 2'-O-methylcytidine-3'-phosphate
  modified_base 20: mod_base = OTHER; note = 2'-O-methylcytidine-3'-phosphate
  modified_base 21: mod_base = OTHER; note = 2'-O-methylcytidine-3'- phosphorothioate
  modified_base 22: mod_base = OTHER; note = 2'-O-methyladenosine-3'- phosphorothioate
  modified_base 23: mod_base = OTHER; note = 2'-O-methylguanosine-3'-phosphate
atcccatccagaggaatgcccag

SEQ ID NO: 5165 - RNA, 23 nt, synthetic construct
  source 1..23: mol_type = other RNA
  modified_base 1: mod_base = OTHER; note = 2'-O-methyladenosine-3'- phosphorothioate
  modified_base 2: mod_base = OTHER; note = 2'-fluoroguanosine-3'-phosphorothioate
  modified_base 3: mod_base = OTHER; note = 2'-O-methyladenosine-3'-phosphate
  modified_base 4: mod_base = OTHER; note = 2'-O-methylcytidine-3'-phosphate
  modified_base 5: mod_base = OTHER; note = 2'-O-methyladenosine-3'-phosphate
  modified_base 6: mod_base = OTHER; note = 2'-fluoroguanosine-3'-phosphate
  modified_base 7: mod_base = OTHER; note = 2'-O-methyluridine-3'-phosphate
  modified_base 8: mod_base = OTHER; note = 2'-fluorocytidine-3'-phosphate
  modified_base 9: mod_base = OTHER; note = 2'-fluorocytidine-3'-phosphate
  modified_base 10: mod_base = OTHER; note = 2'-O-methylcytidine-3'-phosphate
  modified_base 11: mod_base = OTHER; note = 2'-O-methyladenosine-3'-phosphate
  modified_base 12: mod_base = OTHER; note = 2'-O-methyluridine-3'-phosphate
  modified_base 13: mod_base = OTHER; note = 2'-O-methylcytidine-3'-phosphate
  modified_base 14: mod_base = OTHER; note = 2'-fluorocytidine-3'-phosphate
  modified_base 15: mod_base = OTHER; note = 2'-O-methyladenosine-3'-phosphate
  modified_base 16: mod_base = OTHER; note = 2'-fluoroguanosine-3'-phosphate
  modified_base 17: mod_base = OTHER; note = 2'-O-methyladenosine-3'-phosphate
  modified_base 18: mod_base = OTHER; note = 2'-O-methylguanosine-3'-phosphate
  modified_base 19: mod_base = OTHER; note = 2'-O-methylguanosine-3'-phosphate
  modified_base 20: mod_base = OTHER; note = 2'-O-methyladenosine-3'-phosphate
  modified_base 21: mod_base = OTHER; note = 2'-O-methyladenosine-3'- phosphorothioate
  modified_base 22: mod_base = OTHER; note = 2'-O-methyluridine-3'-phosphorothioate
  modified_base 23: mod_base = OTHER; note = 2'-O-methylguanosine-3'-phosphate
agacagtcccatccagaggaatg

SEQ ID NO: 5166 - RNA, 23 nt, synthetic construct
  source 1..23: mol_type = other RNA
  modified_base 1: mod_base = OTHER; note = 2'-O-methyladenosine-3'- phosphorothioate
  modified_base 2: mod_base = OTHER; note = 2'-fluoroadenosine-3'-phosphorothioate
  modified_base 3: mod_base = OTHER; note = 2'-O-methyladenosine-3'-phosphate
  modified_base 4: mod_base = OTHER; note = 2'-O-methyladenosine-3'-phosphate
  modified_base 5: mod_base = OTHER; note = 2'-O-methylcytidine-3'-phosphate
  modified_base 6: mod_base = OTHER; note = 2'-fluoroadenosine-3'-phosphate
  modified_base 7: mod_base = OTHER; note = 2'-O-methylguanosine-3'-phosphate
  modified_base 8: mod_base = OTHER; note = 2'-fluoroadenosine-3'-phosphate
  modified_base 9: mod_base = OTHER; note = 2'-fluorocytidine-3'-phosphate
  modified_base 10: mod_base = OTHER; note = 2'-O-methyladenosine-3'-phosphate
  modified_base 11: mod_base = OTHER; note = 2'-O-methylguanosine-3'-phosphate
  modified_base 12: mod_base = OTHER; note = 2'-O-methyluridine-3'-phosphate
  modified_base 13: mod_base = OTHER; note = 2'-O-methylcytidine-3'-phosphate
  modified_base 14: mod_base = OTHER; note = 2'-fluorocytidine-3'-phosphate
  modified_base 15: mod_base = OTHER; note = 2'-O-methylcytidine-3'-phosphate
  modified_base 16: mod_base = OTHER; note = 2'-fluoroadenosine-3'-phosphate
  modified_base 17: mod_base = OTHER; note = 2'-O-methyluridine-3'-phosphate
  modified_base 18: mod_base = OTHER; note = 2'-O-methylcytidine-3'-phosphate
  modified_base 19: mod_base = OTHER; note = 2'-O-methylcytidine-3'-phosphate
  modified_base 20: mod_base = OTHER; note = 2'-O-methyladenosine-3'-phosphate
  modified_base 21: mod_base = OTHER; note = 2'-O-methylguanosine-3'- phosphorothioate
  modified_base 22: mod_base = OTHER; note = 2'-O-methyladenosine-3'- phosphorothioate
  modified_base 23: mod_base = OTHER; note = 2'-O-methylguanosine-3'-phosphate
aaaacagacagtcccatccagag

SEQ ID NO: 5167 - RNA, 23 nt, synthetic construct
  source 1..23: mol_type = other RNA
  modified_base 1: mod_base = OTHER; note = 2'-O-methyladenosine-3'- phosphorothioate
  modified_base 2: mod_base = OTHER; note = 2'-fluoroguanosine-3'-phosphorothioate
  modified_base 3: mod_base = OTHER; note = 2'-O-methyluridine-3'-phosphate
  modified_base 4: mod_base = OTHER; note = 2'-O-methylcytidine-3'-phosphate
  modified_base 5: mod_base = OTHER; note = 2'-O-methylcytidine-3'-phosphate
  modified_base 6: mod_base = OTHER; note = 2'-fluoroguanosine-3'-phosphate
  modified_base 7: mod_base = OTHER; note = 2'-O-methyladenosine-3'-phosphate
  modified_base 8: mod_base = OTHER; note = 2'-fluoroadenosine-3'-phosphate
  modified_base 9: mod_base = OTHER; note = 2'-fluoroadenosine-3'-phosphate
  modified_base 10: mod_base = OTHER; note = 2'-O-methylcytidine-3'-phosphate
  modified_base 11: mod_base = OTHER; note = 2'-O-methyladenosine-3'-phosphate
  modified_base 12: mod_base = OTHER; note = 2'-O-methylguanosine-3'-phosphate
  modified_base 13: mod_base = OTHER; note = 2'-O-methyladenosine-3'-phosphate
  modified_base 14: mod_base = OTHER; note = 2'-fluorocytidine-3'-phosphate
  modified_base 15: mod_base = OTHER; note = 2'-O-methyladenosine-3'-phosphate
  modified_base 16: mod_base = OTHER; note = 2'-fluoroguanosine-3'-phosphate
  modified_base 17: mod_base = OTHER; note = 2'-O-methyluridine-3'-phosphate
  modified_base 18: mod_base = OTHER; note = 2'-O-methylcytidine-3'-phosphate
  modified_base 19: mod_base = OTHER; note = 2'-O-methylcytidine-3'-phosphate
  modified_base 20: mod_base = OTHER; note = 2'-O-methylcytidine-3'-phosphate
  modified_base 21: mod_base = OTHER; note = 2'-O-methyladenosine-3'- phosphorothioate
  modified_base 22: mod_base = OTHER; note = 2'-O-methyluridine-3'-phosphorothioate
  modified_base 23: mod_base = OTHER; note = 2'-O-methylcytidine-3'-phosphate
agtccgaaacagacagtcccatc

SEQ ID NO: 5168 - RNA, 23 nt, synthetic construct
  source 1..23: mol_type = other RNA
  modified_base 1: mod_base = OTHER; note = 2'-O-methyladenosine-3'- phosphorothioate
  modified_base 2: mod_base = OTHER; note = 2'-fluoroadenosine-3'-phosphorothioate
  modified_base 3: mod_base = OTHER; note = 2'-O-methyladenosine-3'-phosphate
  modified_base 4: mod_base = OTHER; note = 2'-O-methylguanosine-3'-phosphate
  modified_base 5: mod_base = OTHER; note = 2'-O-methyluridine-3'-phosphate
  modified_base 6: mod_base = OTHER; note = 2'-fluorouridine-3'-phosphate
  modified_base 7: mod_base = OTHER; note = 2'-O-methylguanosine-3'-phosphate
  modified_base 8: mod_base = OTHER; note = 2'-fluorouridine-3'-phosphate
  modified_base 9: mod_base = OTHER; note = 2'-fluorocytidine-3'-phosphate
  modified_base 10: mod_base = OTHER; note = 2'-O-methylcytidine-3'-phosphate
  modified_base 11: mod_base = OTHER; note = 2'-O-methylguanosine-3'-phosphate
  modified_base 12: mod_base = OTHER; note = 2'-O-methyladenosine-3'-phosphate
  modified_base 13: mod_base = OTHER; note = 2'-O-methyladenosine-3'-phosphate
  modified_base 14: mod_base = OTHER; note = 2'-fluoroadenosine-3'-phosphate
  modified_base 15: mod_base = OTHER; note = 2'-O-methylcytidine-3'-phosphate
  modified_base 16: mod_base = OTHER; note = 2'-fluoroadenosine-3'-phosphate
  modified_base 17: mod_base = OTHER; note = 2'-O-methylguanosine-3'-phosphate
  modified_base 18: mod_base = OTHER; note = 2'-O-methyladenosine-3'-phosphate
  modified_base 19: mod_base = OTHER; note = 2'-O-methylcytidine-3'-phosphate
  modified_base 20: mod_base = OTHER; note = 2'-O-methyladenosine-3'-phosphate
  modified_base 21: mod_base = OTHER; note = 2'-O-methylguanosine-3'- phosphorothioate
  modified_base 22: mod_base = OTHER; note = 2'-O-methyluridine-3'-phosphorothioate
  modified_base 23: mod_base = OTHER; note = 2'-O-methylcytidine-3'-phosphate
aaagttgtccgaaacagacagtc

SEQ ID NO: 5169 - RNA, 23 nt, synthetic construct
  source 1..23: mol_type = other RNA
  modified_base 1: mod_base = OTHER; note = 2'-O-methyladenosine-3'- phosphorothioate
  modified_base 2: mod_base = OTHER; note = 2'-fluoroadenosine-3'-phosphorothioate
  modified_base 3: mod_base = OTHER; note = 2'-O-methyluridine-3'-phosphate
  modified_base 4: mod_base = OTHER; note = 2'-O-methylguanosine-3'-phosphate
  modified_base 5: mod_base = OTHER; note = 2'-O-methylcytidine-3'-phosphate
  modified_base 6: mod_base = OTHER; note = 2'-fluorocytidine-3'-phosphate
  modified_base 7: mod_base = OTHER; note = 2'-O-methylcytidine-3'-phosphate
  modified_base 8: mod_base = OTHER; note = 2'-fluoroadenosine-3'-phosphate
  modified_base 9: mod_base = OTHER; note = 2'-fluoroguanosine-3'-phosphate
  modified_base 10: mod_base = OTHER; note = 2'-O-methyladenosine-3'-phosphate
  modified_base 11: mod_base = OTHER; note = 2'-O-methyladenosine-3'-phosphate
  modified_base 12: mod_base = OTHER; note = 2'-O-methylguanosine-3'-phosphate
  modified_base 13: mod_base = OTHER; note = 2'-O-methyluridine-3'-phosphate
  modified_base 14: mod_base = OTHER; note = 2'-fluorouridine-3'-phosphate
  modified_base 15: mod_base = OTHER; note = 2'-O-methylguanosine-3'-phosphate
  modified_base 16: mod_base = OTHER; note = 2'-fluorouridine-3'-phosphate
  modified_base 17: mod_base = OTHER; note = 2'-O-methylcytidine-3'-phosphate
  modified_base 18: mod_base = OTHER; note = 2'-O-methylcytidine-3'-phosphate
  modified_base 19: mod_base = OTHER; note = 2'-O-methylguanosine-3'-phosphate
  modified_base 20: mod_base = OTHER; note = 2'-O-methyladenosine-3'-phosphate
  modified_base 21: mod_base = OTHER; note = 2'-O-methyladenosine-3'- phosphorothioate
  modified_base 22: mod_base = OTHER; note = 2'-O-methyladenosine-3'- phosphorothioate
  modified_base 23: mod_base = OTHER; note = 2'-O-methylcytidine-3'-phosphate
aatgcccagaagttgtccgaaac

SEQ ID NO: 5170 - RNA, 23 nt, synthetic construct
  source 1..23: mol_type = other RNA
  modified_base 1: mod_base = OTHER; note = 2'-O-methyladenosine-3'- phosphorothioate
  modified_base 2: mod_base = OTHER; note = 2'-fluorouridine -3'-phosphorothioate
  modified_base 3: mod_base = OTHER; note = 2'-O-methylguanosine-3'-phosphate
  modified_base 4: mod_base = OTHER; note = 2'-O-methylguanosine-3'-phosphate
  modified_base 5: mod_base = OTHER; note = 2'-O-methyluridine-3'-phosphate
  modified_base 6: mod_base = OTHER; note = 2'-fluorocytidine-3'-phosphate
  modified_base 7: mod_base = OTHER; note = 2'-O-methyladenosine-3'-phosphate
  modified_base 8: mod_base = OTHER; note = 2'-fluorocytidine-3'-phosphate
  modified_base 9: mod_base = OTHER; note = 2'-fluoroadenosine-3'-phosphate
  modified_base 10: mod_base = OTHER; note = 2'-O-methylcytidine-3'-phosphate
  modified_base 11: mod_base = OTHER; note = 2'-O-methyladenosine-3'-phosphate
  modified_base 12: mod_base = OTHER; note = 2'-O-methyluridine-3'-phosphate
  modified_base 13: mod_base = OTHER; note = 2'-O-methylguanosine-3'-phosphate
  modified_base 14: mod_base = OTHER; note = 2'-fluorocytidine-3'-phosphate
  modified_base 15: mod_base = OTHER; note = 2'-O-methylcytidine-3'-phosphate
  modified_base 16: mod_base = OTHER; note = 2'-fluorocytidine-3'-phosphate
  modified_base 17: mod_base = OTHER; note = 2'-O-methyladenosine-3'-phosphate
  modified_base 18: mod_base = OTHER; note = 2'-O-methylguanosine-3'-phosphate
  modified_base 19: mod_base = OTHER; note = 2'-O-methyladenosine-3'-phosphate
  modified_base 20: mod_base = OTHER; note = 2'-O-methyladenosine-3'-phosphate
  modified_base 21: mod_base = OTHER; note = 2'-O-methylguanosine-3'- phosphorothioate
  modified_base 22: mod_base = OTHER; note = 2'-O-methyluridine-3'-phosphorothioate
  modified_base 23: mod_base = OTHER; note = 2'-O-methyluridine-3'-phosphate
atggtcacacatgcccagaagtt

SEQ ID NO: 5171 - RNA, 23 nt, synthetic construct
  source 1..23: mol_type = other RNA
  modified_base 1: mod_base = OTHER; note = 2'-O-methyladenosine-3'- phosphorothioate
  modified_base 2: mod_base = OTHER; note = 2'-fluoroadenosine-3'-phosphorothioate
  modified_base 3: mod_base = OTHER; note = 2'-O-methylguanosine-3'-phosphate
  modified_base 4: mod_base = OTHER; note = 2'-O-methyladenosine-3'-phosphate
  modified_base 5: mod_base = OTHER; note = 2'-O-methylguanosine-3'-phosphate
  modified_base 6: mod_base = OTHER; note = 2'-fluoroadenosine-3'-phosphate
  modified_base 7: mod_base = OTHER; note = 2'-O-methylguanosine-3'-phosphate
  modified_base 8: mod_base = OTHER; note = 2'-fluoroadenosine-3'-phosphate
  modified_base 9: mod_base = OTHER; note = 2'-fluorocytidine-3'-phosphate
  modified_base 10: mod_base = OTHER; note = 2'-O-methylguanosine-3'-phosphate
  modified_base 11: mod_base = OTHER; note = 2'-O-methyluridine-3'-phosphate
  modified_base 12: mod_base = OTHER; note = 2'-O-methylguanosine-3'-phosphate
  modified_base 13: mod_base = OTHER; note = 2'-O-methylguanosine-3'-phosphate
  modified_base 14: mod_base = OTHER; note = 2'-fluorouridine-3'-phosphate
  modified_base 15: mod_base = OTHER; note = 2'-O-methylcytidine-3'-phosphate
  modified_base 16: mod_base = OTHER; note = 2'-fluoroadenosine-3'-phosphate
  modified_base 17: mod_base = OTHER; note = 2'-O-methylcytidine-3'-phosphate
  modified_base 18: mod_base = OTHER; note = 2'-O-methyladenosine-3'-phosphate
  modified_base 19: mod_base = OTHER; note = 2'-O-methylcytidine-3'-phosphate
  modified_base 20: mod_base = OTHER; note = 2'-O-methyladenosine-3'-phosphate
  modified_base 21: mod_base = OTHER; note = 2'-O-methyluridine-3'-phosphorothioate
  modified_base 22: mod_base = OTHER; note = 2'-O-methylguanosine-3'- phosphorothioate
  modified_base 23: mod_base = OTHER; note = 2'-O-methylcytidine-3'-phosphate
aagagagacgtggtcacacatgc

SEQ ID NO: 5172 - RNA, 23 nt, synthetic construct
  source 1..23: mol_type = other RNA
  modified_base 1: mod_base = OTHER; note = 2'-O-methyladenosine-3'- phosphorothioate
  modified_base 2: mod_base = OTHER; note = 2'-fluoroadenosine-3'-phosphorothioate
  modified_base 3: mod_base = OTHER; note = 2'-O-methylguanosine-3'-phosphate
  modified_base 4: mod_base = OTHER; note = 2'-O-methyluridine-3'-phosphate
  modified_base 5: mod_base = OTHER; note = 2'-O-methylguanosine-3'-phosphate
  modified_base 6: mod_base = OTHER; note = 2'-fluorocytidine-3'-phosphate
  modified_base 7: mod_base = OTHER; note = 2'-O-methyluridine-3'-phosphate
  modified_base 8: mod_base = OTHER; note = 2'-fluoroadenosine-3'-phosphate
  modified_base 9: mod_base = OTHER; note = 2'-fluoroguanosine-3'-phosphate
  modified_base 10: mod_base = OTHER; note = 2'-O-methyladenosine-3'-phosphate
  modified_base 11: mod_base = OTHER; note = 2'-O-methylguanosine-3'-phosphate
  modified_base 12: mod_base = OTHER; note = 2'-O-methyladenosine-3'-phosphate
  modified_base 13: mod_base = OTHER; note = 2'-O-methylguanosine-3'-phosphate
  modified_base 14: mod_base = OTHER; note = 2'-fluoroadenosine-3'-phosphate
  modified_base 15: mod_base = OTHER; note = 2'-O-methylcytidine-3'-phosphate
  modified_base 16: mod_base = OTHER; note = 2'-fluoroguanosine-3'-phosphate
  modified_base 17: mod_base = OTHER; note = 2'-O-methyluridine-3'-phosphate
  modified_base 18: mod_base = OTHER; note = 2'-O-methylguanosine-3'-phosphate
  modified_base 19: mod_base = OTHER; note = 2'-O-methylguanosine-3'-phosphate
  modified_base 20: mod_base = OTHER; note = 2'-O-methyluridine-3'-phosphate
  modified_base 21: mod_base = OTHER; note = 2'-O-methylcytidine-3'- phosphorothioate
  modified_base 22: mod_base = OTHER; note = 2'-O-methyladenosine-3'- phosphorothioate
  modified_base 23: mod_base = OTHER; note = 2'-O-methylcytidine-3'-phosphate
aagtgctagagagacgtggtcac

SEQ ID NO: 5173 - RNA, 23 nt, synthetic construct
  source 1..23: mol_type = other RNA
  modified_base 1: mod_base = OTHER; note = 2'-O-methyladenosine-3'- phosphorothioate
  modified_base 2: mod_base = OTHER; note = 2'-fluoroadenosine-3'-phosphorothioate
  modified_base 3: mod_base = OTHER; note = 2'-O-methylcytidine-3'-phosphate
  modified_base 4: mod_base = OTHER; note = 2'-O-methyladenosine-3'-phosphate
  modified_base 5: mod_base = OTHER; note = 2'-O-methylcytidine-3'-phosphate
  modified_base 6: mod_base = OTHER; note = 2'-fluorouridine-3'-phosphate
  modified_base 7: mod_base = OTHER; note = 2'-O-methyladenosine-3'-phosphate
  modified_base 8: mod_base = OTHER; note = 2'-fluorocytidine-3'-phosphate
  modified_base 9: mod_base = OTHER; note = 2'-fluoroadenosine-3'-phosphate
  modified_base 10: mod_base = OTHER; note = 2'-O-methyluridine-3'-phosphate
  modified_base 11: mod_base = OTHER; note = 2'-O-methyladenosine-3'-phosphate
  modified_base 12: mod_base = OTHER; note = 2'-O-methylguanosine-3'-phosphate
  modified_base 13: mod_base = OTHER; note = 2'-O-methylcytidine-3'-phosphate
  modified_base 14: mod_base = OTHER; note = 2'-fluorocytidine-3'-phosphate
  modified_base 15: mod_base = OTHER; note = 2'-O-methylguanosine-3'-phosphate
  modified_base 16: mod_base = OTHER; note = 2'-fluoroguanosine-3'-phosphate
  modified_base 17: mod_base = OTHER; note = 2'-O-methylcytidine-3'-phosphate
  modified_base 18: mod_base = OTHER; note = 2'-O-methylcytidine-3'-phosphate
  modified_base 19: mod_base = OTHER; note = 2'-O-methyluridine-3'-phosphate
  modified_base 20: mod_base = OTHER; note = 2'-O-methylguanosine-3'-phosphate
  modified_base 21: mod_base = OTHER; note = 2'-O-methylcytidine-3'- phosphorothioate
  modified_base 22: mod_base = OTHER; note = 2'-O-methylcytidine-3'- phosphorothioate
  modified_base 23: mod_base = OTHER; note = 2'-O-methylcytidine-3'-phosphate
aacactacatagccggcctgccc

SEQ ID NO: 5174 - RNA, 23 nt, synthetic construct
  source 1..23: mol_type = other RNA
  modified_base 1: mod_base = OTHER; note = 2'-O-methyladenosine-3'- phosphorothioate
  modified_base 2: mod_base = OTHER; note = 2'-fluorocytidine-3'-phosphorothioate
  modified_base 3: mod_base = OTHER; note = 2'-O-methyluridine-3'-phosphate
  modified_base 4: mod_base = OTHER; note = 2'-O-methyluridine-3'-phosphate
  modified_base 5: mod_base = OTHER; note = 2'-O-methyladenosine-3'-phosphate
  modified_base 6: mod_base = OTHER; note = 2'-fluorouridine-3'-phosphate
  modified_base 7: mod_base = OTHER; note = 2'-O-methyladenosine-3'-phosphate
  modified_base 8: mod_base = OTHER; note = 2'-fluorocytidine-3'-phosphate
  modified_base 9: mod_base = OTHER; note = 2'-fluoroadenosine-3'-phosphate
  modified_base 10: mod_base = OTHER; note = 2'-O-methylcytidine-3'-phosphate
  modified_base 11: mod_base = OTHER; note = 2'-O-methyluridine-3'-phosphate
  modified_base 12: mod_base = OTHER; note = 2'-O-methyladenosine-3'-phosphate
  modified_base 13: mod_base = OTHER; note = 2'-O-methylcytidine-3'-phosphate
  modified_base 14: mod_base = OTHER; note = 2'-fluoroadenosine-3'-phosphate
  modified_base 15: mod_base = OTHER; note = 2'-O-methyluridine-3'-phosphate
  modified_base 16: mod_base = OTHER; note = 2'-fluoroadenosine-3'-phosphate
  modified_base 17: mod_base = OTHER; note = 2'-O-methylguanosine-3'-phosphate
  modified_base 18: mod_base = OTHER; note = 2'-O-methylcytidine-3'-phosphate
  modified_base 19: mod_base = OTHER; note = 2'-O-methylcytidine-3'-phosphate
  modified_base 20: mod_base = OTHER; note = 2'-O-methylguanosine-3'-phosphate
  modified_base 21: mod_base = OTHER; note = 2'-O-methylguanosine-3'- phosphorothioate
  modified_base 22: mod_base = OTHER; note = 2'-O-methylcytidine-3'- phosphorothioate
  modified_base 23: mod_base = OTHER; note = 2'-O-methylcytidine-3'-phosphate
acttatacactacatagccggcc

SEQ ID NO: 5175 - RNA, 23 nt, synthetic construct
  source 1..23: mol_type = other RNA
  modified_base 1: mod_base = OTHER; note = 2'-O-methyladenosine-3'- phosphorothioate
  modified_base 2: mod_base = OTHER; note = 2'-fluoroadenosine-3'-phosphorothioate
  modified_base 3: mod_base = OTHER; note = 2'-O-methyladenosine-3'-phosphate
  modified_base 4: mod_base = OTHER; note = 2'-O-methyluridine-3'-phosphate
  modified_base 5: mod_base = OTHER; note = 2'-O-methylguanosine-3'-phosphate
  modified_base 6: mod_base = OTHER; note = 2'-fluoroguanosine-3'-phosphate
  modified_base 7: mod_base = OTHER; note = 2'-O-methyladenosine-3'-phosphate
  modified_base 8: mod_base = OTHER; note = 2'-fluorocytidine-3'-phosphate
  modified_base 9: mod_base = OTHER; note = 2'-fluorouridine-3'-phosphate
  modified_base 10: mod_base = OTHER; note = 2'-O-methyluridine-3'-phosphate
  modified_base 11: mod_base = OTHER; note = 2'-O-methyladenosine-3'-phosphate
  modified_base 12: mod_base = OTHER; note = 2'-O-methyluridine-3'-phosphate
  modified_base 13: mod_base = OTHER; note = 2'-O-methyladenosine-3'-phosphate
  modified_base 14: mod_base = OTHER; note = 2'-fluorocytidine-3'-phosphate
  modified_base 15: mod_base = OTHER; note = 2'-O-methyladenosine-3'-phosphate
  modified_base 16: mod_base = OTHER; note = 2'-fluorocytidine-3'-phosphate
  modified_base 17: mod_base = OTHER; note = 2'-O-methyluridine-3'-phosphate
  modified_base 18: mod_base = OTHER; note = 2'-O-methyladenosine-3'-phosphate
  modified_base 19: mod_base = OTHER; note = 2'-O-methylcytidine-3'-phosphate
  modified_base 20: mod_base = OTHER; note = 2'-O-methyladenosine-3'-phosphate
  modified_base 21: mod_base = OTHER; note = 2'-O-methyluridine-3'-phosphorothioate
  modified_base 22: mod_base = OTHER; note = 2'-O-methyladenosine-3'- phosphorothioate
  modified_base 23: mod_base = OTHER; note = 2'-O-methylguanosine-3'-phosphate
aaatggacttatacactacatag

SEQ ID NO: 5176 - RNA, 23 nt, synthetic construct
  source 1..23: mol_type = other RNA
  modified_base 1: mod_base = OTHER; note = 2'-O-methyladenosine-3'- phosphorothioate
  modified_base 2: mod_base = OTHER; note = 2'-fluorouridine -3'-phosphorothioate
  modified_base 3: mod_base = OTHER; note = 2'-O-methyladenosine-3'-phosphate
  modified_base 4: mod_base = OTHER; note = 2'-O-methylguanosine-3'-phosphate
  modified_base 5: mod_base = OTHER; note = 2'-O-methylguanosine-3'-phosphate
  modified_base 6: mod_base = OTHER; note = 2'-fluoroguanosine-3'-phosphate
  modified_base 7: mod_base = OTHER; note = 2'-O-methyladenosine-3'-phosphate
  modified_base 8: mod_base = OTHER; note = 2'-fluoroadenosine-3'-phosphate
  modified_base 9: mod_base = OTHER; note = 2'-fluorouridine-3'-phosphate
  modified_base 10: mod_base = OTHER; note = 2'-O-methylguanosine-3'-phosphate
  modified_base 11: mod_base = OTHER; note = 2'-O-methylguanosine-3'-phosphate
  modified_base 12: mod_base = OTHER; note = 2'-O-methyladenosine-3'-phosphate
  modified_base 13: mod_base = OTHER; note = 2'-O-methylcytidine-3'-phosphate
  modified_base 14: mod_base = OTHER; note = 2'-fluorouridine-3'-phosphate
  modified_base 15: mod_base = OTHER; note = 2'-O-methyluridine-3'-phosphate
  modified_base 16: mod_base = OTHER; note = 2'-fluoroadenosine-3'-phosphate
  modified_base 17: mod_base = OTHER; note = 2'-O-methyluridine-3'-phosphate
  modified_base 18: mod_base = OTHER; note = 2'-O-methyladenosine-3'-phosphate
  modified_base 19: mod_base = OTHER; note = 2'-O-methylcytidine-3'-phosphate
  modified_base 20: mod_base = OTHER; note = 2'-O-methyladenosine-3'-phosphate
  modified_base 21: mod_base = OTHER; note = 2'-O-methylcytidine-3'- phosphorothioate
  modified_base 22: mod_base = OTHER; note = 2'-O-methyluridine-3'-phosphorothioate
  modified_base 23: mod_base = OTHER; note = 2'-O-methyladenosine-3'-phosphate
atagggaatggacttatacacta

SEQ ID NO: 5177 - RNA, 23 nt, synthetic construct
  source 1..23: mol_type = other RNA
  modified_base 1: mod_base = OTHER; note = 2'-O-methyladenosine-3'- phosphorothioate
  modified_base 2: mod_base = OTHER; note = 2'-fluoroguanosine-3'-phosphorothioate
  modified_base 3: mod_base = OTHER; note = 2'-O-methyladenosine-3'-phosphate
  modified_base 4: mod_base = OTHER; note = 2'-O-methylguanosine-3'-phosphate
  modified_base 5: mod_base = OTHER; note = 2'-O-methylcytidine-3'-phosphate
  modified_base 6: mod_base = OTHER; note = 2'-fluorocytidine-3'-phosphate
  modified_base 7: mod_base = OTHER; note = 2'-O-methyladenosine-3'-phosphate
  modified_base 8: mod_base = OTHER; note = 2'-fluorouridine-3'-phosphate
  modified_base 9: mod_base = OTHER; note = 2'-fluoroadenosine-3'-phosphate
  modified_base 10: mod_base = OTHER; note = 2'-O-methylguanosine-3'-phosphate
  modified_base 11: mod_base = OTHER; note = 2'-O-methylguanosine-3'-phosphate
  modified_base 12: mod_base = OTHER; note = 2'-O-methylguanosine-3'-phosphate
  modified_base 13: mod_base = OTHER; note = 2'-O-methyladenosine-3'-phosphate
  modified_base 14: mod_base = OTHER; note = 2'-fluoroadenosine-3'-phosphate
  modified_base 15: mod_base = OTHER; note = 2'-O-methyluridine-3'-phosphate
  modified_base 16: mod_base = OTHER; note = 2'-fluoroguanosine-3'-phosphate
  modified_base 17: mod_base = OTHER; note = 2'-O-methylguanosine-3'-phosphate
  modified_base 18: mod_base = OTHER; note = 2'-O-methyladenosine-3'-phosphate
  modified_base 19: mod_base = OTHER; note = 2'-O-methylcytidine-3'-phosphate
  modified_base 20: mod_base = OTHER; note = 2'-O-methyluridine-3'-phosphate
  modified_base 21: mod_base = OTHER; note = 2'-O-methyluridine-3'-phosphorothioate
  modified_base 22: mod_base = OTHER; note = 2'-O-methyladenosine-3'- phosphorothioate
  modified_base 23: mod_base = OTHER; note = 2'-O-methyluridine-3'-phosphate
agagccatagggaatggacttat

SEQ ID NO: 5178 - RNA, 23 nt, synthetic construct
  source 1..23: mol_type = other RNA
  modified_base 1: mod_base = OTHER; note = 2'-O-methyladenosine-3'- phosphorothioate
  modified_base 2: mod_base = OTHER; note = 2'-fluorocytidine-3'-phosphorothioate
  modified_base 3: mod_base = OTHER; note = 2'-O-methyluridine-3'-phosphate
  modified_base 4: mod_base = OTHER; note = 2'-O-methylcytidine-3'-phosphate
  modified_base 5: mod_base = OTHER; note = 2'-O-methylcytidine-3'-phosphate
  modified_base 6: mod_base = OTHER; note = 2'-fluoroadenosine-3'-phosphate
  modified_base 7: mod_base = OTHER; note = 2'-O-methyladenosine-3'-phosphate
  modified_base 8: mod_base = OTHER; note = 2'-fluoroguanosine-3'-phosphate
  modified_base 9: mod_base = OTHER; note = 2'-fluoroguanosine-3'-phosphate
  modified_base 10: mod_base = OTHER; note = 2'-O-methyladenosine-3'-phosphate
  modified_base 11: mod_base = OTHER; note = 2'-O-methylguanosine-3'-phosphate
  modified_base 12: mod_base = OTHER; note = 2'-O-methylcytidine-3'-phosphate
  modified_base 13: mod_base = OTHER; note = 2'-O-methylcytidine-3'-phosphate
  modified_base 14: mod_base = OTHER; note = 2'-fluoroadenosine-3'-phosphate
  modified_base 15: mod_base = OTHER; note = 2'-O-methyluridine-3'-phosphate
  modified_base 16: mod_base = OTHER; note = 2'-fluoroadenosine-3'-phosphate
  modified_base 17: mod_base = OTHER; note = 2'-O-methylguanosine-3'-phosphate
  modified_base 18: mod_base = OTHER; note = 2'-O-methylguanosine-3'-phosphate
  modified_base 19: mod_base = OTHER; note = 2'-O-methylguanosine-3'-phosphate
  modified_base 20: mod_base = OTHER; note = 2'-O-methyladenosine-3'-phosphate
  modified_base 21: mod_base = OTHER; note = 2'-O-methyladenosine-3'- phosphorothioate
  modified_base 22: mod_base = OTHER; note = 2'-O-methyluridine-3'-phosphorothioate
  modified_base 23: mod_base = OTHER; note = 2'-O-methylguanosine-3'-phosphate
actccaaggagccatagggaatg

SEQ ID NO: 5179 - RNA, 23 nt, synthetic construct
  source 1..23: mol_type = other RNA
  modified_base 1: mod_base = OTHER; note = 2'-O-methyladenosine-3'- phosphorothioate
  modified_base 2: mod_base = OTHER; note = 2'-fluoroadenosine-3'-phosphorothioate
  modified_base 3: mod_base = OTHER; note = 2'-O-methyluridine-3'-phosphate
  modified_base 4: mod_base = OTHER; note = 2'-O-methyluridine-3'-phosphate
  modified_base 5: mod_base = OTHER; note = 2'-O-methyladenosine-3'-phosphate
  modified_base 6: mod_base = OTHER; note = 2'-fluorocytidine-3'-phosphate
  modified_base 7: mod_base = OTHER; note = 2'-O-methylcytidine-3'-phosphate
  modified_base 8: mod_base = OTHER; note = 2'-fluorouridine-3'-phosphate
  modified_base 9: mod_base = OTHER; note = 2'-fluorocytidine-3'-phosphate
  modified_base 10: mod_base = OTHER; note = 2'-O-methylcytidine-3'-phosphate
  modified_base 11: mod_base = OTHER; note = 2'-O-methyluridine-3'-phosphate
  modified_base 12: mod_base = OTHER; note = 2'-O-methylcytidine-3'-phosphate
  modified_base 13: mod_base = OTHER; note = 2'-O-methylcytidine-3'-phosphate
  modified_base 14: mod_base = OTHER; note = 2'-fluoroadenosine-3'-phosphate
  modified_base 15: mod_base = OTHER; note = 2'-O-methyladenosine-3'-phosphate
  modified_base 16: mod_base = OTHER; note = 2'-fluoroguanosine-3'-phosphate
  modified_base 17: mod_base = OTHER; note = 2'-O-methylguanosine-3'-phosphate
  modified_base 18: mod_base = OTHER; note = 2'-O-methyladenosine-3'-phosphate
  modified_base 19: mod_base = OTHER; note = 2'-O-methylguanosine-3'-phosphate
  modified_base 20: mod_base = OTHER; note = 2'-O-methylcytidine-3'-phosphate
  modified_base 21: mod_base = OTHER; note = 2'-O-methylcytidine-3'- phosphorothioate
  modified_base 22: mod_base = OTHER; note = 2'-O-methyladenosine-3'- phosphorothioate
  modified_base 23: mod_base = OTHER; note = 2'-O-methyluridine-3'-phosphate
aattacctcctccaaggagccat

SEQ ID NO: 5180 - RNA, 23 nt, synthetic construct
  source 1..23: mol_type = other RNA
  modified_base 1: mod_base = OTHER; note = 2'-O-methyladenosine-3'- phosphorothioate
  modified_base 2: mod_base = OTHER; note = 2'-fluorouridine -3'-phosphorothioate
  modified_base 3: mod_base = OTHER; note = 2'-O-methyluridine-3'-phosphate
  modified_base 4: mod_base = OTHER; note = 2'-O-methylcytidine-3'-phosphate
  modified_base 5: mod_base = OTHER; note = 2'-O-methyluridine-3'-phosphate
  modified_base 6: mod_base = OTHER; note = 2'-fluorocytidine-3'-phosphate
  modified_base 7: mod_base = OTHER; note = 2'-O-methylcytidine-3'-phosphate
  modified_base 8: mod_base = OTHER; note = 2'-fluorouridine-3'-phosphate
  modified_base 9: mod_base = OTHER; note = 2'-fluoroguanosine-3'-phosphate
  modified_base 10: mod_base = OTHER; note = 2'-O-methylguanosine-3'-phosphate
  modified_base 11: mod_base = OTHER; note = 2'-O-methylguanosine-3'-phosphate
  modified_base 12: mod_base = OTHER; note = 2'-O-methylcytidine-3'-phosphate
  modified_base 13: mod_base = OTHER; note = 2'-O-methylcytidine-3'-phosphate
  modified_base 14: mod_base = OTHER; note = 2'-fluorocytidine-3'-phosphate
  modified_base 15: mod_base = OTHER; note = 2'-O-methyluridine-3'-phosphate
  modified_base 16: mod_base = OTHER; note = 2'-fluorocytidine-3'-phosphate
  modified_base 17: mod_base = OTHER; note = 2'-O-methylcytidine-3'-phosphate
  modified_base 18: mod_base = OTHER; note = 2'-O-methylguanosine-3'-phosphate
  modified_base 19: mod_base = OTHER; note = 2'-O-methylguanosine-3'-phosphate
  modified_base 20: mod_base = OTHER; note = 2'-O-methyladenosine-3'-phosphate
  modified_base 21: mod_base = OTHER; note = 2'-O-methyluridine-3'-phosphorothioate
  modified_base 22: mod_base = OTHER; note = 2'-O-methylcytidine-3'- phosphorothioate
  modified_base 23: mod_base = OTHER; note = 2'-O-methyladenosine-3'-phosphate
attctcctgggccctccggatca

SEQ ID NO: 5181 - RNA, 23 nt, synthetic construct
  source 1..23: mol_type = other RNA
  modified_base 1: mod_base = OTHER; note = 2'-O-methyladenosine-3'- phosphorothioate
  modified_base 2: mod_base = OTHER; note = 2'-fluorocytidine-3'-phosphorothioate
  modified_base 3: mod_base = OTHER; note = 2'-O-methylcytidine-3'-phosphate
  modified_base 4: mod_base = OTHER; note = 2'-O-methyluridine-3'-phosphate
  modified_base 5: mod_base = OTHER; note = 2'-O-methylguanosine-3'-phosphate
  modified_base 6: mod_base = OTHER; note = 2'-fluoroadenosine-3'-phosphate
  modified_base 7: mod_base = OTHER; note = 2'-O-methyladenosine-3'-phosphate
  modified_base 8: mod_base = OTHER; note = 2'-fluoroguanosine-3'-phosphate
  modified_base 9: mod_base = OTHER; note = 2'-fluorocytidine-3'-phosphate
  modified_base 10: mod_base = OTHER; note = 2'-O-methyladenosine-3'-phosphate
  modified_base 11: mod_base = OTHER; note = 2'-O-methylcytidine-3'-phosphate
  modified_base 12: mod_base = OTHER; note = 2'-O-methylguanosine-3'-phosphate
  modified_base 13: mod_base = OTHER; note = 2'-O-methylcytidine-3'-phosphate
  modified_base 14: mod_base = OTHER; note = 2'-fluorouridine-3'-phosphate
  modified_base 15: mod_base = OTHER; note = 2'-O-methylcytidine-3'-phosphate
  modified_base 16: mod_base = OTHER; note = 2'-fluorocytidine-3'-phosphate
  modified_base 17: mod_base = OTHER; note = 2'-O-methylguanosine-3'-phosphate
  modified_base 18: mod_base = OTHER; note = 2'-O-methylguanosine-3'-phosphate
  modified_base 19: mod_base = OTHER; note = 2'-O-methyluridine-3'-phosphate
  modified_base 20: mod_base = OTHER; note = 2'-O-methyluridine-3'-phosphate
  modified_base 21: mod_base = OTHER; note = 2'-O-methylcytidine-3'- phosphorothioate
  modified_base 22: mod_base = OTHER; note = 2'-O-methyluridine-3'-phosphorothioate
  modified_base 23: mod_base = OTHER; note = 2'-O-methylcytidine-3'-phosphate
acctgaagcacgctccggttctc

SEQ ID NO: 5182 - RNA, 23 nt, synthetic construct
  source 1..23: mol_type = other RNA
  modified_base 1: mod_base = OTHER; note = 2'-O-methyladenosine-3'- phosphorothioate
  modified_base 2: mod_base = OTHER; note = 2'-fluorouridine -3'-phosphorothioate
  modified_base 3: mod_base = OTHER; note = 2'-O-methylguanosine-3'-phosphate
  modified_base 4: mod_base = OTHER; note = 2'-O-methyluridine-3'-phosphate
  modified_base 5: mod_base = OTHER; note = 2'-O-methyluridine-3'-phosphate
  modified_base 6: mod_base = OTHER; note = 2'-fluorocytidine-3'-phosphate
  modified_base 7: mod_base = OTHER; note = 2'-O-methylcytidine-3'-phosphate
  modified_base 8: mod_base = OTHER; note = 2'-fluorocytidine-3'-phosphate
  modified_base 9: mod_base = OTHER; note = 2'-fluorouridine-3'-phosphate
  modified_base 10: mod_base = OTHER; note = 2'-O-methylguanosine-3'-phosphate
  modified_base 11: mod_base = OTHER; note = 2'-O-methylcytidine-3'-phosphate
  modified_base 12: mod_base = OTHER; note = 2'-O-methylguanosine-3'-phosphate
  modified_base 13: mod_base = OTHER; note = 2'-O-methylguanosine-3'-phosphate
  modified_base 14: mod_base = OTHER; note = 2'-fluoroguanosine-3'-phosphate
  modified_base 15: mod_base = OTHER; note = 2'-O-methylcytidine-3'-phosphate
  modified_base 16: mod_base = OTHER; note = 2'-fluoroadenosine-3'-phosphate
  modified_base 17: mod_base = OTHER; note = 2'-O-methylcytidine-3'-phosphate
  modified_base 18: mod_base = OTHER; note = 2'-O-methylcytidine-3'-phosphate
  modified_base 19: mod_base = OTHER; note = 2'-O-methylcytidine-3'-phosphate
  modified_base 20: mod_base = OTHER; note = 2'-O-methyluridine-3'-phosphate
  modified_base 21: mod_base = OTHER; note = 2'-O-methylguanosine-3'- phosphorothioate
  modified_base 22: mod_base = OTHER; note = 2'-O-methyladenosine-3'- phosphorothioate
  modified_base 23: mod_base = OTHER; note = 2'-O-methyladenosine-3'-phosphate
atgttccctgcgggcaccctgaa

SEQ ID NO: 5183 - RNA, 23 nt, synthetic construct
  source 1..23: mol_type = other RNA
  modified_base 1: mod_base = OTHER; note = 2'-O-methyladenosine-3'- phosphorothioate
  modified_base 2: mod_base = OTHER; note = 2'-fluorouridine -3'-phosphorothioate
  modified_base 3: mod_base = OTHER; note = 2'-O-methylguanosine-3'-phosphate
  modified_base 4: mod_base = OTHER; note = 2'-O-methyladenosine-3'-phosphate
  modified_base 5: mod_base = OTHER; note = 2'-O-methylguanosine-3'-phosphate
  modified_base 6: mod_base = OTHER; note = 2'-fluorocytidine-3'-phosphate
  modified_base 7: mod_base = OTHER; note = 2'-O-methyladenosine-3'-phosphate
  modified_base 8: mod_base = OTHER; note = 2'-fluoroguanosine-3'-phosphate
  modified_base 9: mod_base = OTHER; note = 2'-fluorocytidine-3'-phosphate
  modified_base 10: mod_base = OTHER; note = 2'-O-methyluridine-3'-phosphate
  modified_base 11: mod_base = OTHER; note = 2'-O-methylcytidine-3'-phosphate
  modified_base 12: mod_base = OTHER; note = 2'-O-methylcytidine-3'-phosphate
  modified_base 13: mod_base = OTHER; note = 2'-O-methyluridine-3'-phosphate
  modified_base 14: mod_base = OTHER; note = 2'-fluoroguanosine-3'-phosphate
  modified_base 15: mod_base = OTHER; note = 2'-O-methyluridine-3'-phosphate
  modified_base 16: mod_base = OTHER; note = 2'-fluorouridine-3'-phosphate
  modified_base 17: mod_base = OTHER; note = 2'-O-methylcytidine-3'-phosphate
  modified_base 18: mod_base = OTHER; note = 2'-O-methylcytidine-3'-phosphate
  modified_base 19: mod_base = OTHER; note = 2'-O-methylcytidine-3'-phosphate
  modified_base 20: mod_base = OTHER; note = 2'-O-methyluridine-3'-phosphate
  modified_base 21: mod_base = OTHER; note = 2'-O-methylguanosine-3'- phosphorothioate
  modified_base 22: mod_base = OTHER; note = 2'-O-methylcytidine-3'- phosphorothioate
  modified_base 23: mod_base = OTHER; note = 2'-O-methylguanosine-3'-phosphate
atgagcagctcctgttccctgcg

SEQ ID NO: 5184 - RNA, 23 nt, synthetic construct
  source 1..23: mol_type = other RNA
  modified_base 1: mod_base = OTHER; note = 2'-O-methyladenosine-3'- phosphorothioate
  modified_base 2: mod_base = OTHER; note = 2'-fluorouridine -3'-phosphorothioate
  modified_base 3: mod_base = OTHER; note = 2'-O-methyluridine-3'-phosphate
  modified_base 4: mod_base = OTHER; note = 2'-O-methylguanosine-3'-phosphate
  modified_base 5: mod_base = OTHER; note = 2'-O-methylguanosine-3'-phosphate
  modified_base 6: mod_base = OTHER; note = 2'-fluorocytidine-3'-phosphate
  modified_base 7: mod_base = OTHER; note = 2'-O-methyluridine-3'-phosphate
  modified_base 8: mod_base = OTHER; note = 2'-fluoroguanosine-3'-phosphate
  modified_base 9: mod_base = OTHER; note = 2'-fluoroadenosine-3'-phosphate
  modified_base 10: mod_base = OTHER; note = 2'-O-methylguanosine-3'-phosphate
  modified_base 11: mod_base = OTHER; note = 2'-O-methylcytidine-3'-phosphate
  modified_base 12: mod_base = OTHER; note = 2'-O-methyladenosine-3'-phosphate
  modified_base 13: mod_base = OTHER; note = 2'-O-methylguanosine-3'-phosphate
  modified_base 14: mod_base = OTHER; note = 2'-fluorocytidine-3'-phosphate
  modified_base 15: mod_base = OTHER; note = 2'-O-methyluridine-3'-phosphate
  modified_base 16: mod_base = OTHER; note = 2'-fluorocytidine-3'-phosphate
  modified_base 17: mod_base = OTHER; note = 2'-O-methylcytidine-3'-phosphate
  modified_base 18: mod_base = OTHER; note = 2'-O-methyluridine-3'-phosphate
  modified_base 19: mod_base = OTHER; note = 2'-O-methylguanosine-3'-phosphate
  modified_base 20: mod_base = OTHER; note = 2'-O-methyluridine-3'-phosphate
  modified_base 21: mod_base = OTHER; note = 2'-O-methyluridine-3'-phosphorothioate
  modified_base 22: mod_base = OTHER; note = 2'-O-methylcytidine-3'- phosphorothioate
  modified_base 23: mod_base = OTHER; note = 2'-O-methylcytidine-3'-phosphate
attggctgagcagctcctgttcc

SEQ ID NO: 5185 - RNA, 23 nt, synthetic construct
  source 1..23: mol_type = other RNA
  modified_base 1: mod_base = OTHER; note = 2'-O-methyladenosine-3'- phosphorothioate
  modified_base 2: mod_base = OTHER; note = 2'-fluoroadenosine-3'-phosphorothioate
  modified_base 3: mod_base = OTHER; note = 2'-O-methylguanosine-3'-phosphate
  modified_base 4: mod_base = OTHER; note = 2'-O-methyluridine-3'-phosphate
  modified_base 5: mod_base = OTHER; note = 2'-O-methyluridine-3'-phosphate
  modified_base 6: mod_base = OTHER; note = 2'-fluorocytidine-3'-phosphate
  modified_base 7: mod_base = OTHER; note = 2'-O-methyluridine-3'-phosphate
  modified_base 8: mod_base = OTHER; note = 2'-fluorouridine-3'-phosphate
  modified_base 9: mod_base = OTHER; note = 2'-fluoroguanosine-3'-phosphate
  modified_base 10: mod_base = OTHER; note = 2'-O-methylguanosine-3'-phosphate
  modified_base 11: mod_base = OTHER; note = 2'-O-methylcytidine-3'-phosphate
  modified_base 12: mod_base = OTHER; note = 2'-O-methyluridine-3'-phosphate
  modified_base 13: mod_base = OTHER; note = 2'-O-methylguanosine-3'-phosphate
  modified_base 14: mod_base = OTHER; note = 2'-fluoroadenosine-3'-phosphate
  modified_base 15: mod_base = OTHER; note = 2'-O-methylguanosine-3'-phosphate
  modified_base 16: mod_base = OTHER; note = 2'-fluorocytidine-3'-phosphate
  modified_base 17: mod_base = OTHER; note = 2'-O-methyladenosine-3'-phosphate
  modified_base 18: mod_base = OTHER; note = 2'-O-methylguanosine-3'-phosphate
  modified_base 19: mod_base = OTHER; note = 2'-O-methylcytidine-3'-phosphate
  modified_base 20: mod_base = OTHER; note = 2'-O-methyluridine-3'-phosphate
  modified_base 21: mod_base = OTHER; note = 2'-O-methylcytidine-3'- phosphorothioate
  modified_base 22: mod_base = OTHER; note = 2'-O-methylcytidine-3'- phosphorothioate
  modified_base 23: mod_base = OTHER; note = 2'-O-methyluridine-3'-phosphate
aagttcttggctgagcagctcct

SEQ ID NO: 5186 - RNA, 23 nt, synthetic construct
  source 1..23: mol_type = other RNA
  modified_base 1: mod_base = OTHER; note = 2'-O-methyladenosine-3'- phosphorothioate
  modified_base 2: mod_base = OTHER; note = 2'-fluoroguanosine-3'-phosphorothioate
  modified_base 3: mod_base = OTHER; note = 2'-O-methylcytidine-3'-phosphate
  modified_base 4: mod_base = OTHER; note = 2'-O-methylcytidine-3'-phosphate
  modified_base 5: mod_base = OTHER; note = 2'-O-methyladenosine-3'-phosphate
  modified_base 6: mod_base = OTHER; note = 2'-fluorocytidine-3'-phosphate
  modified_base 7: mod_base = OTHER; note = 2'-O-methyladenosine-3'-phosphate
  modified_base 8: mod_base = OTHER; note = 2'-fluoroguanosine-3'-phosphate
  modified_base 9: mod_base = OTHER; note = 2'-fluorouridine-3'-phosphate
  modified_base 10: mod_base = OTHER; note = 2'-O-methyluridine-3'-phosphate
  modified_base 11: mod_base = OTHER; note = 2'-O-methylcytidine-3'-phosphate
  modified_base 12: mod_base = OTHER; note = 2'-O-methyluridine-3'-phosphate
  modified_base 13: mod_base = OTHER; note = 2'-O-methyluridine-3'-phosphate
  modified_base 14: mod_base = OTHER; note = 2'-fluoroguanosine-3'-phosphate
  modified_base 15: mod_base = OTHER; note = 2'-O-methylguanosine-3'-phosphate
  modified_base 16: mod_base = OTHER; note = 2'-fluorocytidine-3'-phosphate
  modified_base 17: mod_base = OTHER; note = 2'-O-methyluridine-3'-phosphate
  modified_base 18: mod_base = OTHER; note = 2'-O-methylguanosine-3'-phosphate
  modified_base 19: mod_base = OTHER; note = 2'-O-methyladenosine-3'-phosphate
  modified_base 20: mod_base = OTHER; note = 2'-O-methylguanosine-3'-phosphate
  modified_base 21: mod_base = OTHER; note = 2'-O-methylcytidine-3'- phosphorothioate
  modified_base 22: mod_base = OTHER; note = 2'-O-methyladenosine-3'- phosphorothioate
  modified_base 23: mod_base = OTHER; note = 2'-O-methylguanosine-3'-phosphate
agccacagttcttggctgagcag

SEQ ID NO: 5187 - RNA, 23 nt, synthetic construct
  source 1..23: mol_type = other RNA
  modified_base 1: mod_base = OTHER; note = 2'-O-methyladenosine-3'- phosphorothioate
  modified_base 2: mod_base = OTHER; note = 2'-fluorouridine -3'-phosphorothioate
  modified_base 3: mod_base = OTHER; note = 2'-O-methyladenosine-3'-phosphate
  modified_base 4: mod_base = OTHER; note = 2'-O-methyluridine-3'-phosphate
  modified_base 5: mod_base = OTHER; note = 2'-O-methylcytidine-3'-phosphate
  modified_base 6: mod_base = OTHER; note = 2'-fluorocytidine-3'-phosphate
  modified_base 7: mod_base = OTHER; note = 2'-O-methyluridine-3'-phosphate
  modified_base 8: mod_base = OTHER; note = 2'-fluorouridine-3'-phosphate
  modified_base 9: mod_base = OTHER; note = 2'-fluorocytidine-3'-phosphate
  modified_base 10: mod_base = OTHER; note = 2'-O-methylguanosine-3'-phosphate
  modified_base 11: mod_base = OTHER; note = 2'-O-methylguanosine-3'-phosphate
  modified_base 12: mod_base = OTHER; note = 2'-O-methylcytidine-3'-phosphate
  modified_base 13: mod_base = OTHER; note = 2'-O-methyladenosine-3'-phosphate
  modified_base 14: mod_base = OTHER; note = 2'-fluorouridine-3'-phosphate
  modified_base 15: mod_base = OTHER; note = 2'-O-methylcytidine-3'-phosphate
  modified_base 16: mod_base = OTHER; note = 2'-fluorocytidine-3'-phosphate
  modified_base 17: mod_base = OTHER; note = 2'-O-methyluridine-3'-phosphate
  modified_base 18: mod_base = OTHER; note = 2'-O-methylguanosine-3'-phosphate
  modified_base 19: mod_base = OTHER; note = 2'-O-methylguanosine-3'-phosphate
  modified_base 20: mod_base = OTHER; note = 2'-O-methylcytidine-3'-phosphate
  modified_base 21: mod_base = OTHER; note = 2'-O-methyladenosine-3'- phosphorothioate
  modified_base 22: mod_base = OTHER; note = 2'-O-methylguanosine-3'- phosphorothioate
  modified_base 23: mod_base = OTHER; note = 2'-O-methylcytidine-3'-phosphate
atatccttcggcatcctggcagc

SEQ ID NO: 5188 - RNA, 23 nt, synthetic construct
  source 1..23: mol_type = other RNA
  modified_base 1: mod_base = OTHER; note = 2'-O-methyladenosine-3'- phosphorothioate
  modified_base 2: mod_base = OTHER; note = 2'-fluoroguanosine-3'-phosphorothioate
  modified_base 3: mod_base = OTHER; note = 2'-O-methyladenosine-3'-phosphate
  modified_base 4: mod_base = OTHER; note = 2'-O-methylcytidine-3'-phosphate
  modified_base 5: mod_base = OTHER; note = 2'-O-methyluridine-3'-phosphate
  modified_base 6: mod_base = OTHER; note = 2'-fluorouridine-3'-phosphate
  modified_base 7: mod_base = OTHER; note = 2'-O-methyluridine-3'-phosphate
  modified_base 8: mod_base = OTHER; note = 2'-fluorouridine-3'-phosphate
  modified_base 9: mod_base = OTHER; note = 2'-fluoroadenosine-3'-phosphate
  modified_base 10: mod_base = OTHER; note = 2'-O-methyluridine-3'-phosphate
  modified_base 11: mod_base = OTHER; note = 2'-O-methyluridine-3'-phosphate
  modified_base 12: mod_base = OTHER; note = 2'-O-methylguanosine-3'-phosphate
  modified_base 13: mod_base = OTHER; note = 2'-O-methyladenosine-3'-phosphate
  modified_base 14: mod_base = OTHER; note = 2'-fluorocytidine-3'-phosphate
  modified_base 15: mod_base = OTHER; note = 2'-O-methylcytidine-3'-phosphate
  modified_base 16: mod_base = OTHER; note = 2'-fluoroadenosine-3'-phosphate
  modified_base 17: mod_base = OTHER; note = 2'-O-methylcytidine-3'-phosphate
  modified_base 18: mod_base = OTHER; note = 2'-O-methyladenosine-3'-phosphate
  modified_base 19: mod_base = OTHER; note = 2'-O-methyluridine-3'-phosphate
  modified_base 20: mod_base = OTHER; note = 2'-O-methylguanosine-3'-phosphate
  modified_base 21: mod_base = OTHER; note = 2'-O-methyladenosine-3'- phosphorothioate
  modified_base 22: mod_base = OTHER; note = 2'-O-methylcytidine-3'- phosphorothioate
  modified_base 23: mod_base = OTHER; note = 2'-O-methylcytidine-3'-phosphate
agacttttattgaccacatgacc

SEQ ID NO: 5189 - RNA, 23 nt, synthetic construct
  source 1..23: mol_type = other RNA
  modified_base 1: mod_base = OTHER; note = 2'-O-methyladenosine-3'- phosphorothioate
  modified_base 2: mod_base = OTHER; note = 2'-fluorocytidine-3'-phosphorothioate
  modified_base 3: mod_base = OTHER; note = 2'-O-methyladenosine-3'-phosphate
  modified_base 4: mod_base = OTHER; note = 2'-O-methylcytidine-3'-phosphate
  modified_base 5: mod_base = OTHER; note = 2'-O-methylcytidine-3'-phosphate
  modified_base 6: mod_base = OTHER; note = 2'-fluorouridine-3'-phosphate
  modified_base 7: mod_base = OTHER; note = 2'-O-methyladenosine-3'-phosphate
  modified_base 8: mod_base = OTHER; note = 2'-fluoroadenosine-3'-phosphate
  modified_base 9: mod_base = OTHER; note = 2'-fluoroguanosine-3'-phosphate
  modified_base 10: mod_base = OTHER; note = 2'-O-methylguanosine-3'-phosphate
  modified_base 11: mod_base = OTHER; note = 2'-O-methyladenosine-3'-phosphate
  modified_base 12: mod_base = OTHER; note = 2'-O-methylcytidine-3'-phosphate
  modified_base 13: mod_base = OTHER; note = 2'-O-methyluridine-3'-phosphate
  modified_base 14: mod_base = OTHER; note = 2'-fluorouridine-3'-phosphate
  modified_base 15: mod_base = OTHER; note = 2'-O-methyluridine-3'-phosphate
  modified_base 16: mod_base = OTHER; note = 2'-fluorouridine-3'-phosphate
  modified_base 17: mod_base = OTHER; note = 2'-O-methyladenosine-3'-phosphate
  modified_base 18: mod_base = OTHER; note = 2'-O-methyluridine-3'-phosphate
  modified_base 19: mod_base = OTHER; note = 2'-O-methyluridine-3'-phosphate
  modified_base 20: mod_base = OTHER; note = 2'-O-methylguanosine-3'-phosphate
  modified_base 21: mod_base = OTHER; note = 2'-O-methyladenosine-3'- phosphorothioate
  modified_base 22: mod_base = OTHER; note = 2'-O-methylcytidine-3'- phosphorothioate
  modified_base 23: mod_base = OTHER; note = 2'-O-methylcytidine-3'-phosphate
acacctaaggacttttattgacc

SEQ ID NO: 5190 - RNA, 23 nt, synthetic construct
  source 1..23: mol_type = other RNA
  modified_base 1: mod_base = OTHER; note = 2'-O-methyladenosine-3'- phosphorothioate
  modified_base 2: mod_base = OTHER; note = 2'-fluoroguanosine-3'-phosphorothioate
  modified_base 3: mod_base = OTHER; note = 2'-O-methylguanosine-3'-phosphate
  modified_base 4: mod_base = OTHER; note = 2'-O-methylcytidine-3'-phosphate
  modified_base 5: mod_base = OTHER; note = 2'-O-methyladenosine-3'-phosphate
  modified_base 6: mod_base = OTHER; note = 2'-fluoroguanosine-3'-phosphate
  modified_base 7: mod_base = OTHER; note = 2'-O-methylcytidine-3'-phosphate
  modified_base 8: mod_base = OTHER; note = 2'-fluoroadenosine-3'-phosphate
  modified_base 9: mod_base = OTHER; note = 2'-fluorocytidine-3'-phosphate
  modified_base 10: mod_base = OTHER; note = 2'-O-methylcytidine-3'-phosphate
  modified_base 11: mod_base = OTHER; note = 2'-O-methyluridine-3'-phosphate
  modified_base 12: mod_base = OTHER; note = 2'-O-methyladenosine-3'-phosphate
  modified_base 13: mod_base = OTHER; note = 2'-O-methyladenosine-3'-phosphate
  modified_base 14: mod_base = OTHER; note = 2'-fluoroguanosine-3'-phosphate
  modified_base 15: mod_base = OTHER; note = 2'-O-methylguanosine-3'-phosphate
  modified_base 16: mod_base = OTHER; note = 2'-fluoroadenosine-3'-phosphate
  modified_base 17: mod_base = OTHER; note = 2'-O-methylcytidine-3'-phosphate
  modified_base 18: mod_base = OTHER; note = 2'-O-methyluridine-3'-phosphate
  modified_base 19: mod_base = OTHER; note = 2'-O-methyluridine-3'-phosphate
  modified_base 20: mod_base = OTHER; note = 2'-O-methyluridine-3'-phosphate
  modified_base 21: mod_base = OTHER; note = 2'-O-methyluridine-3'-phosphorothioate
  modified_base 22: mod_base = OTHER; note = 2'-O-methyladenosine-3'- phosphorothioate
  modified_base 23: mod_base = OTHER; note = 2'-O-methyluridine-3'-phosphate
aggcagcacctaaggacttttat

SEQ ID NO: 5191 - RNA, 23 nt, synthetic construct
  source 1..23: mol_type = other RNA
agagaaccttccctggtgtggag

SEQ ID NO: 5192 - RNA, 23 nt, synthetic construct
  source 1..23: mol_type = other RNA
accttccctggtgtggaggcagc

SEQ ID NO: 5193 - RNA, 23 nt, synthetic construct
  source 1..23: mol_type = other RNA
cccaggatgctccggacctgtta

SEQ ID NO: 5194 - RNA, 23 nt, synthetic construct
  source 1..23: mol_type = other RNA
gatgctccggacctgttacgtgc

SEQ ID NO: 5195 - RNA, 23 nt, synthetic construct
  source 1..23: mol_type = other RNA
cggacctgttacgtgctctgttc

SEQ ID NO: 5196 - RNA, 23 nt, synthetic construct
  source 1..23: mol_type = other RNA
gttacgtgctctgttcccaagct

SEQ ID NO: 5197 - RNA, 23 nt, synthetic construct
  source 1..23: mol_type = other RNA
gtgctctgttcccaagctggtcc

SEQ ID NO: 5198 - RNA, 23 nt, synthetic construct
  source 1..23: mol_type = other RNA
ggctggcagtccctgagctttga

SEQ ID NO: 5199 - RNA, 23 nt, synthetic construct
  source 1..23: mol_type = other RNA
cagtccctgagctttgatggcgg

SEQ ID NO: 5200 - RNA, 23 nt, synthetic construct
  source 1..23: mol_type = other RNA
gggccttccaccttaagggcaca

SEQ ID NO: 5201 - RNA, 23 nt, synthetic construct
  source 1..23: mol_type = other RNA
tccaccttaagggcacaggagag

SEQ ID NO: 5202 - RNA, 23 nt, synthetic construct
  source 1..23: mol_type = other RNA
aagggcacaggagagctgacacg

SEQ ID NO: 5203 - RNA, 23 nt, synthetic construct
  source 1..23: mol_type = other RNA
caggagagctgacacgggccttg

SEQ ID NO: 5204 - RNA, 23 nt, synthetic construct
  source 1..23: mol_type = other RNA
ctgacacgggccttgctggttct

SEQ ID NO: 5205 - RNA, 23 nt, synthetic construct
  source 1..23: mol_type = other RNA
gccttgctggttctccggctgtg

SEQ ID NO: 5206 - RNA, 23 nt, synthetic construct
  source 1..23: mol_type = other RNA
ctggttctccggctgtgtgcctg

SEQ ID NO: 5207 - RNA, 23 nt, synthetic construct
  source 1..23: mol_type = other RNA
cactcgtcactcacgggctgttg

SEQ ID NO: 5208 - RNA, 23 nt, synthetic construct
  source 1..23: mol_type = other RNA
cactcacgggctgttgctccagg

SEQ ID NO: 5209 - RNA, 23 nt, synthetic construct
  source 1..23: mol_type = other RNA
tgttgctccaggcctggtctcgg

SEQ ID NO: 5210 - RNA, 23 nt, synthetic construct
  source 1..23: mol_type = other RNA
ccggctctcaggcgcatttctcc

SEQ ID NO: 5211 - RNA, 23 nt, synthetic construct
  source 1..23: mol_type = other RNA
tctcaggcgcatttctccgagca

SEQ ID NO: 5212 - RNA, 23 nt, synthetic construct
  source 1..23: mol_type = other RNA
ggcgcatttctccgagcatccgt

SEQ ID NO: 5213 - RNA, 23 nt, synthetic construct
  source 1..23: mol_type = other RNA
atttctccgagcatccgtctatg

SEQ ID NO: 5214 - RNA, 23 nt, synthetic construct
  source 1..23: mol_type = other RNA
ccgagcatccgtctatgggcagt

SEQ ID NO: 5215 - RNA, 23 nt, synthetic construct
  source 1..23: mol_type = other RNA
catccgtctatgggcagtttgtg

SEQ ID NO: 5216 - RNA, 23 nt, synthetic construct
  source 1..23: mol_type = other RNA
tctatgggcagtttgtggctggt

SEQ ID NO: 5217 - RNA, 23 nt, synthetic construct
  source 1..23: mol_type = other RNA
ggcagtttgtggctggtgagaca

SEQ ID NO: 5218 - RNA, 23 nt, synthetic construct
  source 1..23: mol_type = other RNA
tgtggctggtgagacagcagagg

SEQ ID NO: 5219 - RNA, 23 nt, synthetic construct
  source 1..23: mol_type = other RNA
tggtgagacagcagaggaggtga

SEQ ID NO: 5220 - RNA, 23 nt, synthetic construct
  source 1..23: mol_type = other RNA
acagcagaggaggtgaagggctg

SEQ ID NO: 5221 - RNA, 23 nt, synthetic construct
  source 1..23: mol_type = other RNA
aggaggtgaagggctgcgtgcag

SEQ ID NO: 5222 - RNA, 23 nt, synthetic construct
  source 1..23: mol_type = other RNA
tgaagggctgcgtgcagcagctg

SEQ ID NO: 5223 - RNA, 23 nt, synthetic construct
  source 1..23: mol_type = other RNA
actgctggcagtgcccactgagg

SEQ ID NO: 5224 - RNA, 23 nt, synthetic construct
  source 1..23: mol_type = other RNA
tggcagtgcccactgaggaggag

SEQ ID NO: 5225 - RNA, 23 nt, synthetic construct
  source 1..23: mol_type = other RNA
cactgaggaggagccggactctg

SEQ ID NO: 5226 - RNA, 23 nt, synthetic construct
  source 1..23: mol_type = other RNA
aggagccggactctgctgccaag

SEQ ID NO: 5227 - RNA, 23 nt, synthetic construct
  source 1..23: mol_type = other RNA
ggactctgctgccaagagtggtg

SEQ ID NO: 5228 - RNA, 23 nt, synthetic construct
  source 1..23: mol_type = other RNA
ctgctgccaagagtggtgaggcg

SEQ ID NO: 5229 - RNA, 23 nt, synthetic construct
  source 1..23: mol_type = other RNA
agagtggtgaggcgtggtatgag

SEQ ID NO: 5230 - RNA, 23 nt, synthetic construct
  source 1..23: mol_type = other RNA
ggaacctcggtgctatgctgcgg

SEQ ID NO: 5231 - RNA, 23 nt, synthetic construct
  source 1..23: mol_type = other RNA
ctcggtgctatgctgcggtgtgt

SEQ ID NO: 5232 - RNA, 23 nt, synthetic construct
  source 1..23: mol_type = other RNA
tgctatgctgcggtgtgtggacc

SEQ ID NO: 5233 - RNA, 23 nt, synthetic construct
  source 1..23: mol_type = other RNA
tgcggtgtgtggacctgtcacgg

SEQ ID NO: 5234 - RNA, 23 nt, synthetic construct
  source 1..23: mol_type = other RNA
gaggccagcctcatgcagctgaa

SEQ ID NO: 5235 - RNA, 23 nt, synthetic construct
  source 1..23: mol_type = other RNA
cagcctcatgcagctgaaggtga

SEQ ID NO: 5236 - RNA, 23 nt, synthetic construct
  source 1..23: mol_type = other RNA
tcatgcagctgaaggtgacggcg

SEQ ID NO: 5237 - RNA, 23 nt, synthetic construct
  source 1..23: mol_type = other RNA
cagctgaaggtgacggcgctgac

SEQ ID NO: 5238 - RNA, 23 nt, synthetic construct
  source 1..23: mol_type = other RNA
aaggtgacggcgctgaccagtac

SEQ ID NO: 5239 - RNA, 23 nt, synthetic construct
  source 1..23: mol_type = other RNA
gcgctgaccagtactcggctctg

SEQ ID NO: 5240 - RNA, 23 nt, synthetic construct
  source 1..23: mol_type = other RNA
ccagtactcggctctgtaaggag

SEQ ID NO: 5241 - RNA, 23 nt, synthetic construct
  source 1..23: mol_type = other RNA
actcggctctgtaaggagctagc

SEQ ID NO: 5242 - RNA, 23 nt, synthetic construct
  source 1..23: mol_type = other RNA
ctctgtaaggagctagcctcgtg

SEQ ID NO: 5243 - RNA, 23 nt, synthetic construct
  source 1..23: mol_type = other RNA
taaggagctagcctcgtgggtca

SEQ ID NO: 5244 - RNA, 23 nt, synthetic construct
  source 1..23: mol_type = other RNA
ctagcctcgtgggtcagaaggcc

SEQ ID NO: 5245 - RNA, 23 nt, synthetic construct
  source 1..23: mol_type = other RNA
tcgtgggtcagaaggccaggagc

SEQ ID NO: 5246 - RNA, 23 nt, synthetic construct
  source 1..23: mol_type = other RNA
aaggccaggagcctccttggagc

SEQ ID NO: 5247 - RNA, 23 nt, synthetic construct
  source 1..23: mol_type = other RNA
caggagcctccttggagctgagc

SEQ ID NO: 5248 - RNA, 23 nt, synthetic construct
  source 1..23: mol_type = other RNA
ccgagaggctggctgaagctatg

SEQ ID NO: 5249 - RNA, 23 nt, synthetic construct
  source 1..23: mol_type = other RNA
ctggctgaagctatggactctgg

SEQ ID NO: 5250 - RNA, 23 nt, synthetic construct
  source 1..23: mol_type = other RNA
aagctatggactctgggcagaac

SEQ ID NO: 5251 - RNA, 23 nt, synthetic construct
  source 1..23: mol_type = other RNA
gactctgggcagaacctccaggt

SEQ ID NO: 5252 - RNA, 23 nt, synthetic construct
  source 1..23: mol_type = other RNA
cagaacctccaggtctcctgcct

SEQ ID NO: 5253 - RNA, 23 nt, synthetic construct
  source 1..23: mol_type = other RNA
cctccaggtctcctgcctcaatg

SEQ ID NO: 5254 - RNA, 23 nt, synthetic construct
  source 1..23: mol_type = other RNA
tctcctgcctcaatgctgagcag

SEQ ID NO: 5255 - RNA, 23 nt, synthetic construct
  source 1..23: mol_type = other RNA
cctcaatgctgagcagaaccagc

SEQ ID NO: 5256 - RNA, 23 nt, synthetic construct
  source 1..23: mol_type = other RNA
atgctgagcagaaccagcacctc

SEQ ID NO: 5257 - RNA, 23 nt, synthetic construct
  source 1..23: mol_type = other RNA
ctgcatcgggtggcacagtatgc

SEQ ID NO: 5258 - RNA, 23 nt, synthetic construct
  source 1..23: mol_type = other RNA
ggctcctggtggatgcggagtac

SEQ ID NO: 5259 - RNA, 23 nt, synthetic construct
  source 1..23: mol_type = other RNA
ggtggatgcggagtacacctcac

SEQ ID NO: 5260 - RNA, 23 nt, synthetic construct
  source 1..23: mol_type = other RNA
atgcggagtacacctcactgaac

SEQ ID NO: 5261 - RNA, 23 nt, synthetic construct
  source 1..23: mol_type = other RNA
gagtacacctcactgaaccctgc

SEQ ID NO: 5262 - RNA, 23 nt, synthetic construct
  source 1..23: mol_type = other RNA
cctcactgaaccctgcgctctcg

SEQ ID NO: 5263 - RNA, 23 nt, synthetic construct
  source 1..23: mol_type = other RNA
tgaaccctgcgctctcgctgctg

SEQ ID NO: 5264 - RNA, 23 nt, synthetic construct
  source 1..23: mol_type = other RNA
ggccctgggtgtggaacacctac

SEQ ID NO: 5265 - RNA, 23 nt, synthetic construct
  source 1..23: mol_type = other RNA
tgggtgtggaacacctaccaggc

SEQ ID NO: 5266 - RNA, 23 nt, synthetic construct
  source 1..23: mol_type = other RNA
acacctaccaggcctgtctaaag

SEQ ID NO: 5267 - RNA, 23 nt, synthetic construct
  source 1..23: mol_type = other RNA
aggcctgtctaaaggacacattc

SEQ ID NO: 5268 - RNA, 23 nt, synthetic construct
  source 1..23: mol_type = other RNA
tgtctaaaggacacattcgagcg

SEQ ID NO: 5269 - RNA, 23 nt, synthetic construct
  source 1..23: mol_type = other RNA
aaggacacattcgagcggctggg

SEQ ID NO: 5270 - RNA, 23 nt, synthetic construct
  source 1..23: mol_type = other RNA
ctggccttcggagtgaagctggt

SEQ ID NO: 5271 - RNA, 23 nt, synthetic construct
  source 1..23: mol_type = other RNA
ttcggagtgaagctggtacgagg

SEQ ID NO: 5272 - RNA, 23 nt, synthetic construct
  source 1..23: mol_type = other RNA
agtgaagctggtacgaggtgcat

SEQ ID NO: 5273 - RNA, 23 nt, synthetic construct
  source 1..23: mol_type = other RNA
agctggtacgaggtgcatatctg

SEQ ID NO: 5274 - RNA, 23 nt, synthetic construct
  source 1..23: mol_type = other RNA
acgaggtgcatatctggacaagg

SEQ ID NO: 5275 - RNA, 23 nt, synthetic construct
  source 1..23: mol_type = other RNA
tgcatatctggacaaggagagag

SEQ ID NO: 5276 - RNA, 23 nt, synthetic construct
  source 1..23: mol_type = other RNA
atctggacaaggagagagcggtg

SEQ ID NO: 5277 - RNA, 23 nt, synthetic construct
  source 1..23: mol_type = other RNA
tggcccagctccatgggatggaa

SEQ ID NO: 5278 - RNA, 23 nt, synthetic construct
  source 1..23: mol_type = other RNA
cagctccatgggatggaagaccc

SEQ ID NO: 5279 - RNA, 23 nt, synthetic construct
  source 1..23: mol_type = other RNA
cactcagcctgactatgaggcca

SEQ ID NO: 5280 - RNA, 23 nt, synthetic construct
  source 1..23: mol_type = other RNA
ctgactatgaggccaccagtcag

SEQ ID NO: 5281 - RNA, 23 nt, synthetic construct
  source 1..23: mol_type = other RNA
atgaggccaccagtcagagttac

SEQ ID NO: 5282 - RNA, 23 nt, synthetic construct
  source 1..23: mol_type = other RNA
ccaccagtcagagttacagccgc

SEQ ID NO: 5283 - RNA, 23 nt, synthetic construct
  source 1..23: mol_type = other RNA
agtcagagttacagccgctgcct

SEQ ID NO: 5284 - RNA, 23 nt, synthetic construct
  source 1..23: mol_type = other RNA
tacagccgctgcctggaactgat

SEQ ID NO: 5285 - RNA, 23 nt, synthetic construct
  source 1..23: mol_type = other RNA
ccgctgcctggaactgatgctga

SEQ ID NO: 5286 - RNA, 23 nt, synthetic construct
  source 1..23: mol_type = other RNA
ctggaactgatgctgacgcacgt

SEQ ID NO: 5287 - RNA, 23 nt, synthetic construct
  source 1..23: mol_type = other RNA
actgatgctgacgcacgtggccc

SEQ ID NO: 5288 - RNA, 23 nt, synthetic construct
  source 1..23: mol_type = other RNA
cccatgtgccacctcatggtggc

SEQ ID NO: 5289 - RNA, 23 nt, synthetic construct
  source 1..23: mol_type = other RNA
acctcatggtggcttcccacaat

SEQ ID NO: 5290 - RNA, 23 nt, synthetic construct
  source 1..23: mol_type = other RNA
gtggcttcccacaatgaggaatc

SEQ ID NO: 5291 - RNA, 23 nt, synthetic construct
  source 1..23: mol_type = other RNA
ttcccacaatgaggaatctgttc

SEQ ID NO: 5292 - RNA, 23 nt, synthetic construct
  source 1..23: mol_type = other RNA
acaatgaggaatctgttcgccag

SEQ ID NO: 5293 - RNA, 23 nt, synthetic construct
  source 1..23: mol_type = other RNA
aatctgttcgccaggcaaccaag

SEQ ID NO: 5294 - RNA, 23 nt, synthetic construct
  source 1..23: mol_type = other RNA
gttcgccaggcaaccaagcgcat

SEQ ID NO: 5295 - RNA, 23 nt, synthetic construct
  source 1..23: mol_type = other RNA
aggcaaccaagcgcatgtgggag

SEQ ID NO: 5296 - RNA, 23 nt, synthetic construct
  source 1..23: mol_type = other RNA
accaagcgcatgtgggagctggg

SEQ ID NO: 5297 - RNA, 23 nt, synthetic construct
  source 1..23: mol_type = other RNA
gcgcatgtgggagctgggcattc

SEQ ID NO: 5298 - RNA, 23 nt, synthetic construct
  source 1..23: mol_type = other RNA
tgtgggagctgggcattcctctg

SEQ ID NO: 5299 - RNA, 23 nt, synthetic construct
  source 1..23: mol_type = other RNA
ctgggcattcctctggatgggac

SEQ ID NO: 5300 - RNA, 23 nt, synthetic construct
  source 1..23: mol_type = other RNA
cattcctctggatgggactgtct

SEQ ID NO: 5301 - RNA, 23 nt, synthetic construct
  source 1..23: mol_type = other RNA
ctctggatgggactgtctgtttc

SEQ ID NO: 5302 - RNA, 23 nt, synthetic construct
  source 1..23: mol_type = other RNA
gatgggactgtctgtttcggaca

SEQ ID NO: 5303 - RNA, 23 nt, synthetic construct
  source 1..23: mol_type = other RNA
gactgtctgtttcggacaacttc

SEQ ID NO: 5304 - RNA, 23 nt, synthetic construct
  source 1..23: mol_type = other RNA
gtttcggacaacttctgggcatg

SEQ ID NO: 5305 - RNA, 23 nt, synthetic construct
  source 1..23: mol_type = other RNA
aacttctgggcatgtgtgaccac

SEQ ID NO: 5306 - RNA, 23 nt, synthetic construct
  source 1..23: mol_type = other RNA
gcatgtgtgaccacgtctctcta

SEQ ID NO: 5307 - RNA, 23 nt, synthetic construct
  source 1..23: mol_type = other RNA
gtgaccacgtctctctagcactg

SEQ ID NO: 5308 - RNA, 23 nt, synthetic construct
  source 1..23: mol_type = other RNA
gggcaggccggctatgtagtgta

SEQ ID NO: 5309 - RNA, 23 nt, synthetic construct
  source 1..23: mol_type = other RNA
ggccggctatgtagtgtataagt

SEQ ID NO: 5310 - RNA, 23 nt, synthetic construct
  source 1..23: mol_type = other RNA
ctatgtagtgtataagtccattc

SEQ ID NO: 5311 - RNA, 23 nt, synthetic construct
  source 1..23: mol_type = other RNA
tagtgtataagtccattccctat

SEQ ID NO: 5312 - RNA, 23 nt, synthetic construct
  source 1..23: mol_type = other RNA
ataagtccattccctatggctcc

SEQ ID NO: 5313 - RNA, 23 nt, synthetic construct
  source 1..23: mol_type = other RNA
cattccctatggctccttggagg

SEQ ID NO: 5314 - RNA, 23 nt, synthetic construct
  source 1..23: mol_type = other RNA
atggctccttggaggaggtaatc

SEQ ID NO: 5315 - RNA, 23 nt, synthetic construct
  source 1..23: mol_type = other RNA
tgatccggagggcccaggagaac

SEQ ID NO: 5316 - RNA, 23 nt, synthetic construct
  source 1..23: mol_type = other RNA
gagaaccggagcgtgcttcaggg

SEQ ID NO: 5317 - RNA, 23 nt, synthetic construct
  source 1..23: mol_type = other RNA
ttcagggtgcccgcagggaacag

SEQ ID NO: 5318 - RNA, 23 nt, synthetic construct
  source 1..23: mol_type = other RNA
cgcagggaacaggagctgctcag

SEQ ID NO: 5319 - RNA, 23 nt, synthetic construct
  source 1..23: mol_type = other RNA
ggaacaggagctgctcagccaag

SEQ ID NO: 5320 - RNA, 23 nt, synthetic construct
  source 1..23: mol_type = other RNA
aggagctgctcagccaagaactg

SEQ ID NO: 5321 - RNA, 23 nt, synthetic construct
  source 1..23: mol_type = other RNA
ctgctcagccaagaactgtggcg

SEQ ID NO: 5322 - RNA, 23 nt, synthetic construct
  source 1..23: mol_type = other RNA
gctgccaggatgccgaaggatac

SEQ ID NO: 5323 - RNA, 23 nt, synthetic construct
  source 1..23: mol_type = other RNA
ggtcatgtggtcaataaaagtcc

SEQ ID NO: 5324 - RNA, 23 nt, synthetic construct
  source 1..23: mol_type = other RNA
ggtcaataaaagtccttaggtgc

SEQ ID NO: 5325 - RNA, 23 nt, synthetic construct
  source 1..23: mol_type = other RNA
ataaaagtccttaggtgctgcct
